(19) United States
(12) Patent Application Publication
(10) Pub. No.: US 2004/0175722 A1
(43) Pub. Date: Sep. 9, 2004

(54) Methods and compositions for reducing screening in oligonucleotide-directed nucleic acid sequence alteration

(76) Inventors: Eric B. Kmiec, Landenberg, PA (US); Anja van Brabant, Newark, DE (US)

Correspondence Address: FISH & NEAVE, 1251 AVENUE OF THE AMERICAS, 50TH FLOOR, NEW YORK, NY, 10020-1105, US

(21) Appl. No.: 10/681,074

(22) Filed: Oct. 7, 2003

Related U.S. Application Data
(60) Provisional application No. 60/416,983, filed on Oct. 7, 2002.
(60) Provisional application No. 60/453,360, filed on Mar. 7, 2003.

(51) Int. Cl. C12Q 1/68

(52) U.S. Cl. 435/6

(57) ABSTRACT

Presented are methods, compositions and kits for reducing the number of target nucleic acid molecules required to be screened during oligonucleotide-directed nucleic acid sequence alteration.

### CROSS-REFERENCE TO RELATED APPLICATIONS

[0001] This application claims the benefit of U.S. provisional applications Nos. 60/453,360, filed Mar. 7, 2003, and 60/416,983, filed Oct. 7, 2002, the disclosures of which are incorporated herein by reference in their entireties.

### FIELD OF THE INVENTION

[0002] The technical field of the invention relates to oligonucleotide-directed alteration of nucleic acid sequence.

### BACKGROUND OF THE INVENTION

[0003] A number of methods have been developed to alter specific nucleotides within both isolated DNA molecules and DNA present within intact cells of bacteria, plants, fungi and animals, including humans.

[0004] In one approach, genomic sequences are targeted for alteration by homologous recombination using duplex fragments. The duplex fragments are large, having several hundred basepairs. See, e.g., Kunzelmann et al., Gene Ther. 3:859-867 (1996).

[0005] In another approach, oligonucleotides are used to effect targeted genetic changes.

[0006] In early experiments, oligonucleotide-directed sequence changes were typically effected in yeast, Moerschell et al., 1988, Proc. Natl. Acad. Sci. 85:524 and Yamamoto et al., Yeast 8:935 (1992), which among eukaryotes are known to have high recombinogenic activity, although one series of experiments were attempted in human cells, Campbell et al., The New Biologist 1: 223-227 (1989).

[0007] More recently, a number of different types of polynucleotides and oligonucleotides have been described that permit targeted alteration of genetic material in cells of higher eukaryotes, including (i) triplex-forming oligonucleotides; (ii) chimeric RNA-DNA oligonucleotides that are internally duplexed, notably in the region containing the nucleotide that directs the sequence alteration; and (iii) terminally modified single-stranded oligonucleotides having an internally unduplexed DNA domain and modified ends.

[0008] Sequence-altering triplexing oligonucleotides are described, for example, in U.S. Pat. Nos. 6,303,376, 5,962,426, and 5,776,744.

[0009] Triplex-forming oligonucleotides require a structural domain that binds to a DNA helical duplex through Hoogsteen interactions between the major groove of the DNA duplex and the oligonucleotide. The binding domain must typically target polypurine or polypyrimidine tracts. These sequence requirements limit the usefulness of triplex-forming oligonucleotides for targeted sequence alteration, requiring that the target sequence to be modified be situated in proximity to such polypurine or polypyrimidine tract. Triplex-forming oligonucleotides may also require an additional DNA reactive moiety, such as psoralen, to be covalently linked to the oligonucleotide, in order to stabilize the interactions between the triplex-forming domain of the oligonucleotide and the DNA double helix if the Hoogsteen interactions from the oligonucleotide/target base composition are insufficient. See, e.g., U.S. Pat. No. 5,422,251. Such DNA-reactive moieties can, however, be indiscriminately mutagenic.

[0010] In more recent work with sequence-altering triplexing oligonucleotides, the triplex-forming domain is linked or tethered to a domain that effects targeted alteration, Culver et al., Nat. Biotechnology 17: 989-93 (1999), relaxing somewhat the permissible distance between target sequence and polypurine/polypyrimidine stretch.

[0011] Internally duplexed, hairpin- and double-hairpin-containing chimeric RNA-DNA oligonucleotides are described, inter alia, in U.S. Pat. Nos. 6,573,046; 5,888,983; 5,871,984; 5,795,972; 5,780,296; 5,760,012; 5,756,325; 5,731,181, and 5,565,350. Such chimeric RNA-DNA oligonucleotides are reportedly capable of directing targeted alteration of single base pairs, as well as introducing frameshift alterations, in cells and cell-free extracts from a variety of host organisms, including bacteria, fungi, plants and animals. The oligonucleotides are reportedly able to operate on almost any target sequence.

[0012] Such chimeric molecules have significant structural requirements, however, including a requirement for both ribonucleotides and deoxyribonucleotides, and typically also a requirement that the oligonucleotide adopt a double-hairpin conformation. Even when such double hairpins are not required, however, significant structural constraints remain.

[0013] Single-stranded oligonucleotides having modified ends and an internally unduplexed DNA domain that directs sequence alteration are described in copending international patent applications published as WO 03/027265; WO 02/10364; WO 01/92512; WO 01/87914; and WO 01/73002, as well as in U.S. Pat. Nos. 6,479,292 and 6,271,360, the disclosures of which are incorporated herein by reference in their entireties.

[0014] These single-stranded oligonucleotides have fewer structural requirements than chimeric oligonucleotides and are capable of directing sequence alteration, including introduction of frameshift mutations, in cells and cell-free extracts from a variety of host organisms, including bacteria, fungi, plants and animals, in episomal and in chromosomal targets, often at alteration efficiencies that exceed those observed with hairpin-containing, internally duplexed, chimeric oligonucleotides.

[0015] The usefulness of oligonucleotide-mediated nucleic acid sequence alteration—as a means, for example, for manipulating cloned DNA, for generating agricultural products with enhanced traits, for generating cellular models for laboratory use, or for generating animal models or animals with desired traits—is affected by its frequency. The usefulness of oligonucleotide-mediated nucleic acid sequence alteration as an ex vivo or in vivo therapeutic method would also be enhanced by increasing its efficiency.

[0016] A need exists, therefore, for methods to enhance the efficiency of targeted alteration of genetic material.

### SUMMARY OF THE INVENTION

[0017] The invention provides methods, compositions and kits for enhancing oligonucleotide-directed nucleic acid sequence alteration by reducing the number of target nucleic acid molecules required to be screened during oligonucleotide-directed targeted nucleic acid sequence alteration. The methods, compositions and kits involve using at least two oligonucleotides, where at least one of the oligonucleotides directs alteration of a selectable target.

[0018] In one aspect, the invention provides methods for reducing the number of target nucleic acid molecules required to be screened during oligonucleotide-directed nucleic acid sequence alteration comprising combining a nucleic acid molecule in the presence of repair proteins with at least two oligonucleotides capable of directing alteration in at least two nucleic acid targets, where alteration by at least one oligonucleotide confers a selectable phenotype which is selected for, and selecting or screening for a nucleic acid molecule having the alteration directed by the other oligonucleotide in a composition having the selectable phenotype.

[0019] In other aspects, the invention provides compositions and kits for oligonucleotide-directed nucleic acid sequence alteration comprising at least two oligonucleotides, where at least one of the oligonucleotides directs an alteration which confers a selectable phenotype.

[0020] Other embodiments of the invention are set forth in the following numbered items:

[0021] 1. A method for reducing the number of target nucleic acid molecules required to be screened during oligonucleotide-directed nucleic acid sequence alteration of a first nucleic acid target in a composition comprising said first nucleic acid target and a second nucleic acid target,

[0022] wherein alteration of said first nucleic acid target is effected by combining, in the presence of cellular repair proteins, a nucleic acid molecule comprising said first nucleic acid target with a first oligonucleotide and a second oligonucleotide,

[0023] wherein said first oligonucleotide is capable of effecting alteration of said first nucleic acid target and said second oligonucleotide is capable of effecting alteration of said second nucleic acid target, and wherein alteration of said second nucleic acid target confers a selectable phenotype,

[0024] said method comprising:

[0025] (a) selecting for alteration of said second nucleic acid target and

[0026] (b) screening for a nucleic acid molecule comprising an alteration of said first nucleic acid target.

[0027] 2. A method for targeted alteration of a first nucleic acid target in a composition comprising said first nucleic acid target and a second nucleic acid target, comprising:

[0028] (a) combining, in the presence of cellular repair proteins, a nucleic acid molecule comprising said first nucleic acid target with a first oligonucleotide and a second oligonucleotide,

[0029] wherein said first oligonucleotide is capable of effecting alteration of said first nucleic acid target and said second oligonucleotide is capable of effecting alteration of said second nucleic acid target, and wherein alteration of said second nucleic acid target confers a selectable phenotype; and

[0030] (b) identifying a nucleic acid molecule comprising an alteration of said first nucleic acid target in a composition in which alteration of the second nucleic acid target has occurred.

[0031] 3. The method of item 1 or 2, wherein alteration of the selectable phenotype is selected from the group consisting of: antibiotic resistance, prototrophy, expression of a fluorescent protein, presence of an epitope and resistance to an apoptotic signal.

[0032] 4. The method of any one of items 1-3, wherein the alteration of the first nucleic acid target is a substitution, deletion or insertion of at least one base.

[0033] 5. The method of item 4, wherein the alteration of the second nucleic acid target is a substitution, deletion or insertion of at least one base.

[0034] 6. The method of any one of items 1-5, wherein the nucleic acid molecule comprising the first nucleic acid target does not comprise the second nucleic acid target.

[0035] 7. The method of any one of items 1-5, wherein the nucleic acid molecule comprising the first nucleic acid target comprises the second nucleic acid target.

[0036] 8. The method of any one of items 1-7, wherein the nucleic acid molecule comprising the first nucleic acid target is a DNA molecule.

[0037] 9. The method of item 8, wherein the DNA molecule is selected from the group consisting of: a chromosome, a plasmid, a YAC, a BAC, a PLAC, a MAC, and a PAC.

[0038] 10. The method of item 8 or 9, wherein the DNA molecule is present in a cell.

[0039] 11. The method of item 10, wherein the cell is selected from the group consisting of: a prokaryotic cell, a fungal cell, a plant cell, and an animal cell.

[0040] 12. The method of item 11, wherein the cell is prokaryotic cell.

[0041] 13. The method of item 12, wherein the prokaryotic cell is an Escherichia Coli cell.

[0042] 14. The method of item 11, wherein the cell is a fungal cell.

[0043] 15. The method of item 14, wherein the fungal cell is selected from the group consisting of: a Saccharomyces cerevisiae cell, an Ustilago maydis cell, a Neurospora crassa cell and a Candida albicans cell.

[0044] 16. The method of item 11, wherein the cell is a plant cell.

[0045] 17. The method of item 16, wherein the plant cell is selected from the group consisting of: an angiosperm cell, a gymnosperm cell and a moss cell.

[0046] 18. The method of item 16, wherein the cell is a Chlamydomonas rheinhardtii cell.

[0047] 19. The method of item 17, wherein the angiosperm cell is an Arabidopsis thaliana cell.

[0048] 20. The method of item 17, wherein the moss cell is a Physcomitrella patens cell.

[0049] 21. The method of item 11, wherein the cell is an animal cell.

[0050] 22. The method of item 21, wherein the animal cell is a mammalian cell.

[0051] 23. The method of item 22, wherein the mammalian cell is selected from the group consisting of: a human cell, a rodent cell, a mouse cell, a hamster cell, a rat cell, and a monkey cell.

[0052] 24. The method of item 23, wherein the human cell is selected from the group consisting of: a liver cell, a lung cell, a colon cell, a cervical cell, a kidney cell, an epithelial cell, a blood cell, a cancer cell, and a stem cell.

[0053] 25. The method of any one of items 1-24, wherein the first oligonucleotide has a region that is fully complementary in sequence to the first nucleic acid target, but for one or more mismatches as between the sequences of the first oligonucleotide and its complement on the first nucleic acid target, and wherein the first oligonucleotide has at least one terminal modification.

[0054] 26. The method of item 25, wherein the at least one terminal modification is selected from the group consisting of: at least one terminal locked nucleic acid (LNA), at least one terminal 2′-O-Me base analog, and at least three terminal phosphorothioate linkages.

[0055] 27. The method of item 26, wherein the first oligonucleotide is a single-stranded oligonucleotide 15-121 nucleotides in length, has an internally unduplexed domain of at least 8 contiguous deoxyribonucleotides, and wherein the one or more mismatches are positioned exclusively in the oligonucleotide DNA domain and at least 7 nucleotides from said oligonucleotide's 5′ and 3′ termini.

[0056] 28. The method of item 27, wherein the first oligonucleotide has at least one terminal locked nucleic acid (LNA).

[0057] 29. The method of item 1 or 2, wherein the first oligonucleotide is at least 25 nucleotides in length.

[0058] 30. The method of item 1 or 2, wherein the first oligonucleotide is no more than 121 nucleotides in length.

[0059] 31. The method of item 30, wherein the first oligonucleotide is no more than 74 nucleotides in length.

[0060] 32. A composition for targeted alteration of a first nucleic acid target, comprising:

[0061] a first oligonucleotide and a second oligonucleotide, wherein the oligonucleotides are capable, in the presence of cellular repair proteins, of effecting targeted alteration of a first nucleic target and a second nucleic acid target, respectively; and

[0062] wherein alteration of the second nucleic acid target confers a selectable phenotype.

[0063] 33. The composition of item 32 further comprising cellular repair proteins.

[0064] 34. The composition of item 33, wherein said cellular proteins are purified.

[0065] 35. The composition of item 33, wherein said cellular proteins are present in a cell-free protein extract.

[0066] 36. The composition of item 33, wherein said cellular proteins are present within an intact cell.

[0067] 37. The composition of any one of items 33-36, wherein the cell is selected from the group consisting of: a prokaryotic cell, a fungal cell, a plant cell, and an animal cell.

[0068] 38. The composition of any one of items 33-37, further comprising lambda beta protein.

[0069] 39. The composition of any one of items 33-37, wherein the cellular proteins are derived from a cell prior-contacted with hydroxyurea.

[0070] 40. The composition of any one of items 33-37, wherein the cellular proteins are derived from a cell prior-contacted with a histone deacetylase inhibitor.

[0071] 41. The composition of item 37, wherein the cell is prokaryotic cell.

[0072] 42. The composition of item 41, wherein the prokaryotic cell is an E. coli cell.

[0073] 43. The composition of item 37, wherein the cell is a fungal cell.

[0074] 44. The composition of item 43, wherein the fungal cell is selected from the group consisting of: a Saccharomyces cerevisiae cell, an Ustilago maydis cell, a Neurospora crassa cell and a Candida albicans cell.

[0075] 45. The composition of item 37, wherein the cell is a plant cell.

[0076] 46. The composition of item 45, wherein the plant cell is selected from the group consisting of: an angiosperm cell, a gymnosperm cell and a moss cell.

[0077] 47. The composition of item 45, wherein the cell is a Chlamydomonas rheinhardtii cell.

[0078] 48. The composition of item 46, wherein the angiosperm cell is an Arabidopsis thaliana cell.

[0079] 49. The composition of item 46, wherein the moss cell is a Physcomitrella patens cell.

[0080] 50. The composition of item 37, wherein the cell is an animal cell.

[0081] 51. The composition of item 50, wherein the animal cell is a mammalian cell.

[0082] 52. The composition of item 51, wherein the mammalian cell is selected from the group consisting of: a human cell, a rodent cell, a mouse cell, a hamster cell, a rat cell, and a monkey cell.

[0083] 53. The composition of item 52, wherein the human cell is selected from the group consisting of: a liver cell, a lung cell, a colon cell, a cervical cell, a kidney cell, an epithelial cell, a blood cell, a cancer cell, and a stem cell.

[0084] 54. The composition of any one of items 32-53, wherein the first oligonucleotide is fully complementary in sequence to the first nucleic acid target, but for one or more mismatches as between the sequences of the first oligonucleotide and its complement on the first nucleic acid target, and wherein the first oligonucleotide has at least one terminal modification.

[0085] 55. The composition of item 54, wherein the at least one terminal modification is selected from the group consisting of: at least one terminal locked nucleic acid (LNA), at least one terminal 2′-O-Me base analog, and at least three terminal phosphorothioate linkages.

[0086] 56. The composition of item 55, wherein the first oligonucleotide is a single-stranded oligonucleotide 15-121 nucleotides in length, has an internally unduplexed domain of at least 7 contiguous deoxyribonucleotides, and wherein the one or more mismatches are positioned exclusively in the oligonucleotide DNA domain and at least 8 nucleotides from said oligonucleotide's 5′ and 3′ termini.

[0087] 57. The composition of item 55, wherein the first oligonucleotide has at least one terminal locked nucleic acid (LNA).

[0088] 58. The composition of any one of items 32-57, wherein said oligonucleotide is at least 25 nucleotides in length.

[0089] 59. The composition of any one of items 32-57, wherein said oligonucleotide is no more than 121 nucleotides in length.

[0090] 60. The composition of item 59, wherein said oligonucleotide is no more than 74 nucleotides in length.

[0091] 61. A kit for targeted alteration of nucleic acid sequence comprising:

[0092] a first oligonucleotide and a second oligonucleotide, wherein the oligonucleotides are capable, in the presence of cellular repair proteins, of effecting targeted alteration of a first nucleic target and a second nucleic acid target, respectively; and

[0093] wherein alteration of the second nucleic acid target confers a selectable phenotype.

[0094] 62. The kit of item 61 further comprising a cellular repair protein.

[0095] 63. The kit of item 62, wherein the cellular repair protein is from a cell precontacted with an HDAC inhibitor; hydroxyurea or lambda phage beta protein.

[0096] 64. The kit of item 62, wherein the cellular repair protein is selected from the group consisting of: RAD10, RAD51, RAD52, RAD54, RAD55, MRE11, PMS1 and XRS2.

[0097] 65. The kit of any one of items 61-64 further comprising an HDAC inhibitor; hydroxyurea or lambda phage beta protein.

[0098] 66. The kit of item 65 further comprising a cell.

[0099] 67. The kit of item 66, wherein the cell has increased levels or activity of at least one protein selected from the group consisting of: RAD10, RAD51, RAD52, RAD54, RAD55, MRE11, PMS1 and XRS2.

[0100] 68. The kit of item 66 or 67, wherein the cell has decreased levels or activity of at least one protein selected from the group consisting of: RAD10, RAD51, RAD52, RAD54, RAD55, MRE11, PMS1 and XRS2.

[0101] 69. The kit of any one of items 66-68, wherein the cell comprises a target nucleic acid sequence, wherein alteration of said target nucleic acid sequence by said second oligonucleotide confers a selectable phenotype.

[0102] 70. The kit of any one of items 61-69, wherein the kit further comprises instructions for performing the method of item 1 or item 2.

### BRIEF DESCRIPTION OF THE DRAWINGS

[0103] FIG 1. Diagram of pAURHYG(x)eGFP target plasmids. Sequences are shown for the normal hygromycin resistance allele (SEQ ID NO: _) and the mutant alleles present in pAURHYG(rep)eGFP (SEQ ID NO:_), pAURHYG(ins)eGFP (SEQ ID NO: _) and pAURHYG(Δ)eGFP (SEQ ID NO: _).

[0104] FIG. 2. Dual targeting protocol. (A) Schematic diagram of the generalized strategy for dual targeting. (B) Sequences of the hygromycin-resistance gene and its mutation. (C) Schematic of the YAC containing the human β-globin locus and the βThal1 and βThal2 sequences that are changed by the corresponding oligonucleotides.

[0105] FIG. 3. Dual targeting results. (A) Efficiency of gene editing of hygromycin mutation using the dual targeting protocol. For these experiments, YAC-containing LSY678IntHyg(rep)βcells are grown in the presence of HU, electroporated with the selectable and nonselectable oligonucleotides, and allowed to recover in the presence of TSA. (B) Gene editing of the human β-globin gene directed by the βThal1 oligonucleotide, including the sequence of the altered segment before (SEQ ID NO: _) and after (SEQ ID NO: _) the conversion.

[0106] FIG. 4. Dual targeting and Rad51. (A) Efficiency of gene editing of hygromycin mutation using the dual targeting protocol in combination with overexpression of yeast Rad51. For these experiments, YAC-containing LSY678IntHyg(rep)β cells are grown in the presence of HU, electroporated with the selectable and nonselectable oligonucleotides, and allowed to recover in the presence of TSA. (B) Gene editing of the human β-globin gene directed by the βThal2 oligonucleotide, including the sequence of the altered segment before (SEQ ID NO: _) and after (SEQ ID NO: _) the conversion.

### DETAILED DESCRIPTION

[0107] We have discovered, surprisingly, that the frequency of oligonucleotide-directed sequence alterations at a first nucleic acid target site is higher in a population of cells that has been selected for concurrent alteration at a second nucleic acid target site, as compared to a population of cells that has not been selected for concurrent alteration at a second nucleic acid target site.

[0108] Accordingly, in a first aspect the invention provides a method for identifying cells having a desired oligonucleotide-directed sequence alteration at a first nucleic acid target site within the cell. The method comprises identifying the desired sequence alteration in cells that have been selected for the presence of a selectable phenotype conferred upon the cell by a concurrent oligonucleotide-directed sequence alteration at a second nucleic acid target site within the cell.

[0109] In a second aspect, the invention provides a method for effecting a desired sequence alteration at a first nucleic acid target site within a cell, the method comprising concurrently targeting first and second nucleic acid sites within the cell for sequence alteration with respective first and second sequence-altering oligonucleotides, the second alteration conferring a selectable phenotype upon the cell; selecting cells having the selectable phenotype; and then identifying among the selected cells those having the desired sequence alteration at the first nucleic acid target site.

[0110] The methods of the present invention increase the efficiency with which bacteria, plant, fungi and animal cells having a desired genotypic change at the first target site may be identified. In related aspects, the invention provides compositions and kits for effecting or facilitating practice of the methods of the present invention.

[0111] Either or both of the first and second nucleic acid target sites within the cell may be in genomic double-stranded DNA.

[0112] The targeted genomic DNA can be normal, cellular chromosomal DNA; organellar DNA, such as mitochondrial or plastid DNA; or extrachromosomal DNA present in cells in different forms including, e.g., mammalian artificial chromosomes (MACs), PACs from P-1 vectors, yeast artificial chromosomes (YACs), bacterial artificial chromosomes (BACs), plant artificial chromosomes (PLACs), BiBACS, as well as episomal DNA, including episomal DNA from an exogenous source such as a plasmid or recombinant vector. Many of these artificial chromosome constructs containing human DNA can be obtained from a variety of sources, including, e.g., the Whitehead Institute, and are described, e.g., in Cohen et al., Nature 336: 698-701 (1993) and Chumakov, et al., Nature 377: 175-297 (1995).

[0113] The first targeted nucleic acid site may be in a part of the DNA that is transcriptionally silent or transcriptionally active; typically, the second targeted nucleic acid site will be in a part of the DNA that is transcriptionally active so as to confer a selectable phenotype upon the cell. The first and second targeted sites may be in any part of a gene including, for example, an exon, an intron, a promoter, an enhancer or a 3′- or 5′-untranslated region, and may be in intergenic regions, with the second targeted site typically being in an exon so as to confer a selectable phenotype upon the cell.

[0114] In some embodiments, the first and/or second sequence-altering oligonucleotide is designed to direct alteration of the transcribed strand of the target sequence; in other embodiments, the first and/or second oligonucleotide is designed to direct alteration of nucleic acid sequence targeting the non-transcribed strand of the target sequence. The targeted strand may differ as between first and second target sites.

[0115] The first and second oligonucleotides may independently be selected from any type of sequence-altering oligonucleotide known in the art, including (i) triplex-forming oligonucleotides; (ii) chimeric RNA-DNA oligonucleotides that are internally duplexed, notably in the region containing the nucleotide that directs the sequence alteration; and (iii) terminally modified single-stranded oligonucleotides having an internally unduplexed DNA domain and modified ends.

[0116] Sequence-altering triplexing oligonucleotides useful in the methods, compositions, and kits of the present invention are described, for example, in U.S. Pat. Nos. 6,303,376, 5,962,426, and 5,776,744, the disclosures of which are incorporated herein by reference in their entireties. Bifunctional oligonucleotides having a triplex-forming domain linked or tethered to a domain that effects targeted alteration, useful in the methods, compositions, and kits of the present invention, are described in Culver et al., Nat. Biotechnology 17: 989-93 (1999), the disclosure of which is incorporated herein by reference in its entirety.

[0117] Internally duplexed, hairpin- and double-hairpin-containing chimeric RNA-DNA oligonucleotides useful in the methods, compositions, and kits of the present invention are described, inter alia, in U.S. Pat. Nos. 6,573,046; 5,888,983; 5,871,984; 5,795,972; 5,780,296; 5,760,012; 5,756,325; 5,731,181, and 5,565,350, the disclosures of which are incorporated herein by reference in their entireties.

[0118] In preferred embodiments, at least one of the first and second oligonucleotides is a single-stranded oligonucleotide having modified ends and an internally unduplexed DNA domain that directs sequence alteration.

[0119] Such oligonucleotides are further described in copending international patent applications published as WO 03/027265; WO 02/10364; WO 01/92512; WO 01/87914; and WO 01/73002, as well as in U.S. Pat. Nos. 6,479,292 and 6,271,360, the disclosures of which are incorporated herein by reference in their entireties.

[0120] In typical embodiments, the oligonucleotide is 17-121 nucleotides in length and has an internally unduplexed domain (that is, a nonhairpin domain) of at least 8 contiguous deoxyribonucleotides. The oligonucleotide is fully complementary in sequence to the sequence of a first strand of the respective nucleic acid target, but for one or more mismatches as between the sequences of the oligonucleotide internally unduplexed deoxyribonucleotide domain and its complement on the target nucleic acid first strand. Each of the mismatches is positioned at least 8 nucleotides from each of the oligonucleotide's 5′ and 3′ termini. The oligonucleotide has at least one terminal modification.

[0121] In some embodiments, the at least one terminal modification may be selected from the group consisting of 2′-O-alkyl, such as 2′-O-methyl, residue; phosphorothioate internucleoside linkage; and locked nucleic acid (LNA) residue. The basic structural and functional characteristics of LNAs and related analogues are disclosed in various publications and patents, including WO 99/14226, WO 00/56748, WO 00/66604, WO 98/39352, U.S. Pat. No. 6,043,060, and U.S. Pat. No. 6,268,490, the disclosures of which are incorporated herein by reference in their entireties. In some embodiments, the terminal modification comprises a plurality of adjacent phosphorothioate internucleoside linkages, such as three phosphorothioate linkages at the 3′ terminus of the oligonucleotide.

[0122] In certain preferred embodiments, both of the first and second sequence-altering oligonucleotides are single-stranded oligonucleotides having modified ends and an internally unduplexed DNA domain that directs sequence alteration.

[0123] In some embodiments, a plurality of single-stranded oligonucleotides having modified ends and an internally unduplexed DNA domain that directs sequence alteration can be used to effect either or both of the first and second sequence alterations. Use of such plural oligonucleotides is described in copending U.S. patent application No. 10/623,107, filed Jul. 18, 2003 (“Targeted Nucleic Acid Sequence Alteration Using Plural Oligonucleotides”), the disclosure of which is incorporated herein by reference in its entirety.

[0124] In the methods, compositions, and kits of the present invention, at least the second oligonucleotide directs a sequence alteration that produces a selectable phenotype. Although the first oligonucleotide may also direct an alteration that produces a selectable phenotype, generally the first oligonucleotide directs an alteration that must be identified by screening, e.g., by determining the corresponding nucleic acid sequence or by assaying a non-selectable phenotype that is generated by the alteration event.

[0125] The selectable phenotype chosen will depend on the host cell chosen and whether the selection is effected in vitro or in vivo. As is well known in the art, exemplary selectable phenotypes include, e.g., antibiotic or other chemical resistance, ability to use a nutrient source, expression of a fluorescent protein, presence of an epitope or resistance to an apoptotic signal. The selectable phenotype chosen may be selectable based on preferential growth of a cell with the desired sequence alteration. Examples of such selectable phenotypes include, e.g., the ability to grow in the presence of a compound that either kills or prevents the growth of the cell such as an apoptotic signal or an antibiotic, the ability to grow in the absence of a nutrient that is required prior to the sequence alteration, or the ability to utilize a particular resource that is not usable prior to the sequence alteration. The selectable phenotype may also be selected mechanically. Examples of phenotypes that may be selected mechanically include, e.g., expression of a fluorescent protein or a particular epitope. Mechanical selection may be by any means known to one of skill in the art including, e.g., FACS (directly in the case of a fluorescent protein or using a labeled antibody for an epitope), column chromatography, or using paramagnetic beads produced by, e.g., Miltenyi Biotec. Selection also does not require intact cells. For example, a single nucleotide change (SNP) in a nucleic acid molecule may be detected and isolated in vitro using methods such as are described in WO 03/027640. In such cases, the first oligonucleotide effects a change in the selected molecule.

[0126] The methods, compositions and kits of the invention typically reduce the number of cells required to be screened by at least about two-fold relative to the number that must be screened in a population of targeted cells that has not previously been selected for an oligonucleotide-directed nucleic acid sequence alteration that confers a selectable phenotype. The reduction can be by at least about two, three, four, five, six, seven, eight, nine, ten, twelve, fifteen, twenty, thirty, and fifty or more fold.

[0127] The methods, compositions and kits of the invention may be used with any oligonucleotide that directs targeted alteration of nucleic acid sequence. In the examples and in Tables 5 to 42 herein, correcting oligonucleotides of defined sequence are provided for alteration of human genes, including correction of genes mutated in human diseases, and for directing specific alterations in plant genes. Each of these oligonucleotides may be a first sequence-altering oligonucleotide as defined herein. Certain of these oligonucleotides may also be a second sequence-altering oligonucleotide as defined herein, e.g., where the oligonucleotide effects a nucleic acid sequence alteration that confers a selectable phenotype such as herbicide resistance. In the tables of these examples, the oligonucleotides are not limited to the particular sequences disclosed. The oligonucleotides include extensions of the appropriate sequence of the longer 121 base oligonucleotides which can be added base by base to the smallest disclosed oligonucleotides of 17 bases. Some oligonucleotides may be 15 or 16 bases which can be obtained by subtraction or one or two bases from the smallest disclosed oligonucleotides of 17 bases. Thus the representative oligonucleotides include for each correcting change, oligonucleotides of length 15, 16, 17, 18, 19, 20, 21, 22, 23, 24, 25, 26, 27, 28, 29, 30, 31, 32, 33, 34, 35, 36, 37, 38, 39, 40, 41, 42, 43, 44, 45, 46, 47, 48, 49, 50, 51, 52, 53, 54, 55, 56, 57, 58, 59, 60, 61, 62, 63, 64, 65, 66, 67, 68, 69, 70, 71, 72, 73, 74, 75, 76, 77, 78, 79, 80, 81, 82, 83, 84, 85, 86, 87, 88, 89, 90, 91, 92, 93, 94, 95, 96, 97, 98, 99, 100, 101, 102, 103, 104, 105, 106, 107, 108, 109, 110, 111, 112, 113, 114, 115, 116, 117, 118, 119, or 120 with further single-nucleotide additions up to the longest sequence disclosed. These oligonucleotide sequences can be used to design first oligonucleotides, or, where the oligonucleotide directs an alteration that confers a selectable phenotype, first and/or second oligonucleotides. Moreover, the oligonucleotides of the invention do not require a symmetrical extension on either side of the central DNA domain. Similarly, the oligonucleotides designed using the sequences of oligonucleotides disclosed in the various tables for correction of human diseases or for directing specific alterations in plant genes comprise structures or modifications that enable them to effect oligonucleotide-directed nucleic acid sequence alteration, such as, e.g., phosphorothioate linkages, LNA residues or chimeric RNA-DNA internally duplexed structure.

[0128] Efficiency of conversion is defined herein as the percentage of recovered substrate target molecules that have undergone a conversion event. Depending on the nature of the target genetic material, e.g. an extrachromosomal element in a cell, efficiency could be represented as the proportion of cells or clones containing an extrachromosomal element that exhibit a particular phenotype. Alternatively, representative samples of the target genetic material can be analyzed, e.g. by sequencing, allele-specific PCR or comparable techniques, to determine the percentage that have acquired the desired change. This latter method of determining efficiency is most frequently applied where the phenotype conferred by the alteration is a non-selectable phenotype.

[0129] Each of the first and second oligonucleotides can direct any kind of alteration, including, for example, deletion, insertion or replacement of 1, 2 or 3 nucleotides in the target sequence. These altered nucleotides may be contiguous or non-contiguous to each other. Multiple alterations can be directed to each of the first and second target sites by a single oligonucleotide or by 1, 2 or 3 separate oligonucleotides. In some embodiments, the multiple alterations are directed by a single oligonucleotide. In some embodiments, the multiple alterations are within 1 to 10 nucleotides of each other.

[0130] The methods, compositions and kits of the invention can be combined with one or more other methods of enhancing the efficiency of oligonucleotide-directed alteration of nucleic acid sequence known in the art.

[0131] Such methods are described, e.g., in copending International patent applications published as WO 02/10364 (“Methods for Enhancing Targeted Gene Alteration Using Oligonucleotides,”); WO 03/027265 (“Composition and Methods for Enhancing Oligonucleotide-Directed Sequence Alteration”); and WO 03/075856 (“Methods, Compositions, and Kits for Enhancing Oligonucleotide-Mediated Nucleic Acid Sequence Alteration Using Compositions Comprising a Histone Deacetylase Inhibitor, Lambda Phage Beta Protein, or Hydroxyurea”), the disclosures of which are incorporated herein by reference in their entireties.

[0132] For example, in typical embodiments of this aspect of the invention, the methods comprise treating a cell or tissue from a bacterium, a fungus, a plant, or an animal with a histone deacetylase (HDAC) inhibitor or hydroxyurea (HU), and then administering to the treated cell or tissue at least first and second oligonucleotides having nucleic acid sequence alteration activity. In other embodiments, the HDAC inhibitor or hydroxyurea, respectively, may be added contemporaneously with oligonucleotide addition or even following oligonucleotide addition.

[0133] The HDAC inhibitor can be trichostatin A.

[0134] One of skill in the art will appreciate, however, that other HDAC inhibitors may be suitable for these purposes. For example, U.S. patent application Publication No. 2002/0143052, which is hereby incorporated by reference in its entirety, discloses compounds having HDAC inhibitor activity due to the presence of a zinc-binding moiety. Other examples of HDAC inhibitors suitable for purposes of the invention include butyric acid, MS-27-275, suberoylanilide hydroxamic acid (SAHA), oxamflatin, trapoxin A, depudecin, FR901228 (also known as depsipeptide), apicidin, m-carboxy-cinnamic acid bishydroxamic acid (CBHA), suberic bishydroxamic acid (SBHA), and pyroxamide. See Marks et al., J. Natl. Canc. Inst. 92(15):1210-1216 (2000), which is hereby incorporated by reference in its entirety. Yet other examples of suitable HDAC inhibitors are chlamydocin, HC-toxin, Cyl-2, WF-3161, and radicicol, as disclosed in WO 00/23567, which is hereby incorporated by reference in its entirety.

[0135] When administering an HDAC inhibitor or HU to cells or cell extracts, the dosage to be administered and the timing of administration will depend on various factors, including cell type.

[0136] In the case of TSA, the dosage may be 10 nM, 100 nM, 1 μM, 10 μM, 100 μM, 1 mM, 10 mM, or even higher, or as little as 1 mM, 100 μM, 10 μM, 1 μM, 100 nM, 10 nM, 1 nM, or even lower. In the case of HU, the dosage may be 100 nM, 1 μM, 10 μM, 100 μM, 1 mM, 10 mM, 100 mM, 1 or even higher, or as little as 100 mM, 10 mM, 1 mM, 100 μM, 10 μM, 1 μM, 100 nM, 10 nM, or even lower.

[0137] In the case of HU, treatment may be with 100 mM, 75 mM, 50 mM, 40 mM, 20 mM, 10 mM, 2 mM, 1 mM, 100 microM, 10 microM, 1 microM, 100 nM, 10 nM or lower. The dosage is preferably from about 4 to 100 mM for yeast cells and from about 0.05 mM to 3 mM for mammalian cells. The dosage may be at least 0.05 mM, 0.10 mM, 0.15 mM, 0.20 mM, 0.25 mM, 0.30 mM, 0.35 mM, 0.40 mM, 0.50 mM or more, including at least 0.55 mM, 0.60 mM, 0.65 mM, 0.70 mM, 0.75 mM, 0.80 mM, mM, 0.90 mM, 0.95 mM or even 1 mM, 1.1 mM, 1.2 mM, 1.3 mM, 1.4 mM, 1.4 mM, 1.5 mM, 1.6 mM, 1.7 mM, 1.8 mM, 1.9 mM, 2.0 mM, 2.5 mM, 3 mM, or more. Typically, the dosage for mammalian cells is less than about 3.0 mM, and can be less than 2.5 mM, 2.0 mM, 1.5 mM, 1.0 mM, even less than 0.90, 0.85, 0.80, 0.75, 0.70, 0.65, 0.60, 0.55, 0.50, 0.45, 0.40, and even less than about 0.35 or 0.30 mM.

[0138] Cells may be grown in the presence of an HDAC inhibitor or HU, and cell extracts may be treated with the HDAC inhibitor or HU, for various times prior to combination with a sequence-altering oligonucleotide. Growth or treatment may be as long as 1 h, 2 h, 3 h, 4 h, 6 h, 8 h, 12 h, 20 h, or even longer, including up to 28 days, 14 days, 7 days, or shorter, or as short as 12 h, 8 h, 6 h, 4 h, 3 h, 2 h, 1 h, or even shorter. Alternatively, treatment of cells or cell extracts with HDAC inhibitor or HU and the sequence-altering oligonucleotide may occur simultaneously, or the HDAC inhibitor or HU, respectively, may be added after oligonucleotide addition.

[0139] Cells may further be allowed to recover from treatment with an HDAC inhibitor or HU by growth in the absence of the HDAC inhibitor or HU for various times prior to treatment with a sequence-altering oligonucleotide. Recovery may be as long as 10 min, 20 min, 40 min, 60 min, 90 min, 2 h, 4 h, or even longer, or as short as 90 min, 60 min, 40 min, 20 min, 10 min, or even shorter. Cells may also be allowed to recover following their treatment with a sequence-altering oligonucleotide. This recovery period may be as long as 1 h, 2 h, 4 h, 6 h, 8 h, 12 h, or even longer, or as short as 8 h, 6 h, 4 h, 2 h, 1 h, or even shorter. The HDAC inhibitor or HU may either be present in or absent from the cell medium during the recovery period.

[0140] Optimum dosages and the timing and duration of administration of HDAC inhibitors and HU to cells or cell extracts can be determined by routine experimentation. For example, optimized dosage and timing of treatment with an HDAC inhibitor, such as TSA, can be determined using the assay system described in WO 03/075856.

[0141] Cultured cells (such as yeast cells) are treated with varying concentrations of HDAC inhibitor for a varying number of hours prior to electroporation with the sequence altering oligonucleotide. After recovery for varying periods, the cells are plated and tested for efficiency of sequence alteration. Parameters are then selected that provide the highest efficiency of correction. The method may then be repeated, as necessary, further to optimize dosage, duration of pretreatment, duration of recovery period, if any, and the like.

[0142] A similar approach for HU can be determined using the assay system set forth in WO 03/075856.

[0143] The methods, compositions, and kits of the instant invention comprising either an HDAC inhibitor, such as trichostatin A, or HU typically increase nucleic acid sequence alteration efficiency by at least two fold relative to the same method respectively lacking the HDAC inhibitor or HU. The increase in nucleic acid sequence alteration efficiency can also be about three, four, five, six, seven, eight, nine, ten, twelve, fifteen, twenty, thirty, and fifty or more fold. The methods, compositions, and kits of the instant invention comprising beta protein increase the efficiency of altering a DNA sequence, as compared to the same method lacking beta protein, typically at least 2 fold, and can increase the efficiency 5 fold, 10 fold, 15 fold, 20 fold, 25 fold, 30 fold, 40 fold, 50 fold, 60 fold, 70 fold, 80 fold, 90 fold, 100 fold, 250 fold, 500 fold, 1000 fold, or more; in certain embodiments, the methods, compositions, and kits of the instant invention that comprise beta protein increase efficiency less than two-fold as compared to comparable methods lacking beta protein, such as 1.9 fold, 1.5 fold, or even by 10%, 20%, 30%, 40%.

[0144] The cells in which targeted nucleic acid sequence alterations may usefully be made according to the methods of the present invention include mammalian cells, including human cells, such as liver, lung, colon, cervix, kidney, and epithelium cells.

[0145] Cultured mammalian cells that usefully may be targeted for desired sequence alteration according to the methods of the present invention include HT1080 cells (human epithelial fibrosarcoma), COS-1 and COS-7 cells (African green monkey), CHO-K1 cells (Chinese hamster ovary), H1299 cells (human epithelial carcinoma, non-small cell lung cancer), C127I (immortal murine mammary epithelial cells), MEF (mouse embryonic fibroblasts), HEC-1-A (human uterine carcinoma), HCT15 (human colon cancer), HCT116 (human colon carcinoma), LoVo (human colon adenocarcinoma), and HeLa (human cervical carcinoma) cancer cells as well as PC12 cells (rat pheochromocytoma).

[0146] Alterations in cultured mammalian cells may usefully be made to create coisogenic cell collections, as described in copending international patent application published as WO 03/027264 and U.S. patent application Ser. No. 10/260,638, the disclosures of which are incorporated herein by reference in their entireties. Genes usefully targeted in such coisogenic collections include loci affecting drug resistance (equivalently, drug sensitivity) or drug metabolism, including: CYP1A2, CYP2C17, CYP2D6, CYP2E, CYP3A4, CYP4A11, CYP1B1, CYP1A1, CYP 2A6, CYP2A13, CYP2B6, CYP2C8, CYP2C9, CYP11A, CYP2C19, CYP2F1, CYP2J2, CYP3A5, CYP3A7, CYP4B1, CYP4F2, CYP4F3, CYP6D1, CYP6F1, CYP7A1, CYP8, CYP11A, CYP11B1, CYP11B 2, CYP17, CYP19, CYP21A2, CYP24, CYP27A1, CYP51, ABCB1, ABCB4, ABCC1, ABCC2, ABCC3, ABCC4, ABCC5, ABCC6, MRP7, ABCC8, ABCC9, ABCC10, ABCC11, ABCC12, EPHX1, EPHX2, LTA4H, TRAG3, GUSB, TMPT, BCRP, HERG, hKCNE2, UDP glucuronosyl transferase (UGT), sulfotransferase, sulfatase, glutathione S-transferase (GST)—alpha, glutathione S-transferase—mu, glutathione S-transferase—pi, ACE, and KCHN2.

[0147] In other embodiments, cells within which targeted alterations may usefully be effected according to the methods of the present invention include progenitor and stem cells—both embryonic (ES) stem cells and non-ES cells such as hematopoietic progenitor or stem cells, including CD34⁺CD38⁻ hematopoietic progenitor and stem cells and muscle-derived stem cells.

[0148] ES cells can be mammalian ES cells, either non-human mammalian ES cells or human ES cells; human ES cells may, e.g., be from a cell line approved for use in the jurisdiction in which the methods, compositions and kits of the present invention are to be used. For example, for use in the United States, any human stem cell line that does not violate state or federal law may be used, such as those cell lines that meet United States federal funding criteria; the National Institutes of Health is currently compiling a list of these existing stem cell lines (http://escr.nih.gov) which includes those held by the following: BresaGen, Inc., Athens, Ga. (4 lines); CyThera, Inc., San Diego, Calif. (9 lines); Karolinska Institute, Stockholm, Sweden (5 lines); Monash University, Melbourne, Australia (6 lines); National Center for Biological Sciences, Bangalore, India (3 lines); Reliance Life Sciences, Mumbai, India (7 lines); Technion-Israel Institute of Technology, Haifa, Israel (4 lines); University of California, San Francisco, Calif. (2 lines); Göteborg University, Goteborg, Sweden (19 lines); Wisconsin Alumni Research Foundation, Madison, Wis. (5 lines).

[0149] In yet other embodiments, the cells within which targeted alterations are made are plant cells.

[0150] Particularly useful plants from which the cells to be used may be drawn include, for example, experimental model plants such as Chlamydomonas reinhardtii, Physcomitrella patens, and Arabidopsis thaliana in addition to crop plants such as cauliflower (Brassica oleracea), artichoke (Cynara scolymus), fruits such as apples (Malus, e.g. domesticus), mangoes (Mangifera, e.g. indica), banana (Musa, e.g. acuminata), berries (such as currant, Ribes, e.g. rubrum), kiwifruit (Actinidia, e.g. chinensis), grapes (Vitis, e.g. vinifera), bell peppers (Capsicum, e.g. annuum), cherries (such as the sweet cherry, Prunus, e.g. avium), cucumber (Cucumis, e.g. sativus), melons (Cucumis, e.g. melo), nuts (such as walnut, Juglans, e.g. regia; peanut, Arachis hypogeae), orange (Citrus, e.g. maxima), peach (Prunus, e.g. persica), pear (Pyra, e.g. communis), plum (Prunus, e.g. domestica), strawberry (Fragaria, e.g. moschata or vesca), tomato (Lycopersicon, e.g. esculentum); leaves and forage, such as alfalfa (Medicago, e.g. sativa or truncatula), cabbage (e.g. Brassica oleracea), endive (Cichoreum, e.g. endivia), leek (Allium, e.g. porrum), lettuce (Lactuca, e.g. sativa), spinach (Spinacia, e.g. oleraceae), tobacco (Nicotiana, e.g. tabacum); roots, such as arrowroot (Maranta, e.g. arundinacea), beet (Beta, e.g. vulgaris), carrot (Daucus, e.g. carota), cassava (Manihot, e.g. esculenta), turnip (Brassica, e.g. rapa), radish (Raphanus, e.g. sativus), yam (Dioscorea, e.g. esculenta), sweet potato (Ipomoea batatas); seeds, including oilseeds, such as beans (Phaseolus, e.g. vulgaris), pea (Pisum, e.g. sativum), soybean (Glycine, e.g. max), cowpea (Vigna unguiculata), mothbean (Vigna aconitifolia), wheat (Triticum, e.g. aestivum), sorghum (Sorghum e.g. bicolor), barley (Hordeum, e.g. vulgare), corn (Zea, e.g. mays), rice (Oryza, e.g. sativa), rapeseed (Brassica napus), millet (Panicum sp.), sunflower (Helianthus annuus), oats (Avena sativa), chickpea (Cicer, e.g. arietinum); tubers, such as kohlrabi (Brassica, e.g. oleraceae), potato (Solanum, e.g. tuberosum) and the like; fiber and wood plants, such as flax (Linum e.g. usitatissimum), cotton (Gossypium e.g. hirsutum), pine (Pinus sp.), oak (Quercus sp.), eucalyptus (Eucalyptus sp.), and the like and ornamental plants such as turfgrass (Lolium, e.g. rigidum), petunia (Petunia, e.g. x hybrida), hyacinth (Hyacinthus orientalis), carnation (Dianthus e.g. caryophyllus), delphinium (Delphinium, e.g. ajacis), Job's tears (Coix lacryma-jobi), snapdragon (Antirrhinum majus), poppy (Papaver, e.g. nudicaule), lilac (Syringa, e.g. vulgaris), hydrangea (Hydrangea e.g. macrophylla), roses (including Gallicas, Albas, Damasks, Damask Perpetuals, Centifolias, Chinas, Teas and Hybrid Teas) and ornamental goldenrods (e.g. Solidago spp.).

[0151] Generally, the oligonucleotides are administered to isolated plant cells or protoplasts according to a method of the present invention and the resulting cells are used to regenerate whole plants according to any method known in the art.

[0152] Relatively few specific plant mutations that produce desirable phenotypes have been described for plant species or cultivars.

[0153] However, the methods, compositions and kits of the instant invention may be used to identify a desirable mutation in one species, for example an experimental model plant, and the desirable mutation can then be introduced in the homologous genes of other species using the kits, compositions and methods of the invention. Further, the methods, compositions and kits of the invention can be used to produce “knock out” mutations by modification of specific amino acid codons to produce stop codons (e.g., a CAA codon specifying glutamine can be modified at a specific site to TAA; a AAG codon specifying lysine can be modified to TAG at a specific site; and a CGA codon for arginine can be modified to a TGA codon at a specific site). Such base pair changes will terminate the reading frame and produce a truncated protein shortened at the site of the stop codon, which truncated protein may be defective or have an altered function. Alternatively, frameshift additions or deletions can be directed at a specific sequence to interrupt the reading frame and produce a garbled downstream protein. Such stop or frameshift mutations can be introduced to determine the effect of knocking out the protein in either plant or animal cells.

[0154] Desirable phenotypes that may be obtained in plants by known nucleic acid sequence alterations include, for example, herbicide resistance; male- or female-sterility; salt, drought, lead, freezing and other stress tolerances; altered amino acid content; altered levels or composition of starch; altered levels or composition of oils; and elimination of epitopes in gluten that are known to instigate autoimmune responses in individuals with celiac disease.

[0155] The cells within which targeted alterations are effected according to the methods of the present invention can be primary isolated cells, selectively enriched cells, cultured cells, or tissue explants.

[0156] In certain ex vivo embodiments of the methods of the present invention, in which targeted sequence alterations are made in non-human cells, such as non-human mammalian ES cells or plant cells, the sequence-altered cells can be used to generate intact organisms, which can thereafter be propagated.

[0157] For example, the methods of the present invention can be used to create genetically altered animals, including livestock—such as cattle, bison, horses, goats, sheep, pigs, chickens, geese, ducks, turkeys, pheasant, ostrich and pigeon—to enhance expression of desirable traits, and/or decrease expression of undesirable traits, by first creating genetically altered cells. In other embodiments, the methods of the present invention can be used to create genetically altered animals useful as laboratory models, such as rodents, including mice, rats, guinea pigs; lagomorphs, such as rabbits; monkeys; apes; dogs; and cats. Methods for producing transgenic animals comprising genetically modified cells are known in the art, and are disclosed, for example, in WO 00/51424, “Genetic Modification of Somatic Cells and Uses Thereof,” the disclosure of which is hereby incorporated herein by reference in its entirety.

[0158] Further aspects of the present invention are the non-human animals produced thereby.

[0159] In other ex vivo embodiments of the methods of the present invention, the targeted sequence alterations are made in human ES cells, which are thereafter used, where legally permissible, to generate tissue or, where permitted, a viable embryo.

[0160] In other ex vivo embodiments of the methods of the present invention, in which targeted sequence alterations are made in human non-ES cells, such as hematopoietic progenitor or stem cells, such as CD34⁺CD38⁻ hematopoietic stem cells, the sequence-altered cells can be reintroduced into a human subject for ex vivo gene therapies.

[0161] In certain particularly useful embodiments of the methods of the present invention, the first and second oligonucleotides are designed to alter the nucleic acid sequence of an expressed human gene or a plant gene.

[0162] The oligonucleotides used in the methods, compositions and kits of the invention can be introduced into cells or tissues by any technique known to one of skill in the art. Such techniques include, for example: electroporation; carrier-mediated delivery using, e.g., liposomes, aqueous-cored lipid vesicles, lipid nanospheres or polycations; naked nucleic acid insertion; particle bombardment and calcium phosphate precipitation. In some embodiments, the oligonucleotides are introduced using electroporation, for example using a BTX ECM® 830 Square Wave electroporator. In other embodiments the transfection is performed with a liposomal transfer compound, for example, DOTAP (N-1-(2,3-Dioleoyloxy) propyl-N,N,N-trimethylammonium methylsulfate, Boehringer-Mannheim) or an equivalent, such as LIPOFECTIN®. In other embodiments, the transfection technique uses cationic lipids. In some embodiments, transfection is performed with Lipofectamine™ 2000 (Invitrogen Corporation, Carlsbad, Calif.).

[0163] The methods of the invention can be used with a wide range of concentrations of oligonucleotides. For example, good results can be achieved with 10 nM/10⁵ cells. A ratio of about 500 ng of oligonucleotide in 3 μg of DOTAP per 10⁵ cells can be used. The transfected cells may be cultured in different media, including, for example, in serum-free media, media supplemented with fetal calf serum, human serum albumin, or human serum. The first and second oligonucleotides are typically used in a 1:1 stoichiometric ratio, but other ratios including, e.g., 1:2, 1:3, 1:4 and 1:5, may be used in the methods, composition and kits of the invention. In some embodiments, the first and second oligonucleotides used in the methods and compositions of the invention are administered simultaneously; in other embodiments the oligonucleotides are adjunctively administered.

[0164] Further embodiments of the invention are compositions and kits comprising a cell, cell-free extract, or cellular repair protein and at least one oligonucleotide which is capable of effecting a desired sequence alteration at a nucleic acid target site, which sequence alteration confers a selectable phenotype. In some embodiments, the compositions and kits also comprise a second oligonucleotide that is capable of effecting a desired sequence alteration, typically a sequence alteration that is frequently desired and/or is not selectable. In some embodiments the compositions or kits comprise a nucleic acid molecule comprising a nucleic acid sequence which is the target for the at least one oligonucleotide which capable of effecting a desired sequence alteration at a nucleic acid target site, which sequence alteration confers a selectable phenotype.

[0165] A cell, cell-free extract, or cellular repair protein for a composition or kit of the invention may be derived from any organism. Compositions and kits of the invention and may comprise any combination of cells, cell-free extracts, or cellular repairs proteins and the cells, cell-free extracts, or cellular repair proteins may be from the same organism or from different organisms. Cellular repair proteins that may be used include, for example, proteins from the RAD52 epistasis group, the mismatch repair group, or the nucleotide excision repair group. In some embodiments, the cell, cell-free extract, or cellular repair protein is or is from a eukaryotic cell or tissue. In some embodiments, the eukaryotic cell is a fungal cell, e.g. a yeast cell. In other embodiments, the cell is a plant cell, e.g., a maize, rice, wheat, barley, soybean, cotton, potato or tomato cell. Other exemplary plant cells include those described elsewhere herein. In some embodiments, the kits comprise a chemical compound selected from the group consisting of: a trichostatin, a histone deacetylase inhibitor and the lambda beta protein. In some embodiments such kits also include instructions for use.

[0166] Other embodiments of the invention relate to kits comprising a nucleic acid molecule the nucleic acid sequence of which has been altered according to a method of the invention or using a composition or kit of the invention. In some embodiments, the invention relates to kits comprising a cell comprising a nucleic acid molecule the nucleic acid sequence of which has been altered according to the methods of the invention or using a composition or kit of the invention. In some embodiments, the nucleic acid molecule is selected from the group consisting of: mammalian artificial chromosomes (MACs), PACs from P-1 vectors, yeast artificial chromosomes (YACs), bacterial artificial chromosomes (BACs), plant artificial chromosomes (PLACs), plasmids, viruses or other recombinant vectors.

[0167] The purified oligonucleotides compositions may be formulated in accordance with routine procedures as a pharmaceutical composition adapted for bathing cells in culture, for microinjection into cells in culture, and for intravenous administration to human beings or animals. Typically, compositions for cellular administration or for intravenous administration into animals, including humans, are solutions in sterile isotonic aqueous buffer. Where necessary, the composition may also include a solubilizing agent and a local anaesthetic such as lignocaine to ease pain at the site of the injection. Generally, the ingredients will be supplied either separately or mixed together in unit dosage form, for example, as a dry, lyophilized powder or water-free concentrate. The composition may be stored in a hermetically sealed container such as an ampule or sachette indicating the quantity of active agent in activity units. Where the composition is administered by infusion, it can be dispensed with an infusion bottle containing sterile pharmaceutical grade “water for injection” or saline. Where the composition is to be administered by injection, an ampule of sterile water for injection or saline may be provided so that the ingredients may be mixed prior to administration.

[0168] Pharmaceutical compositions of this invention comprise the oligonucleotides used in the methods of the present invention and pharmaceutically acceptable salts thereof, with any pharmaceutically acceptable ingredient, excipient, carrier, adjuvant or vehicle.

[0169] The oligonucleotides of the invention are preferably administered to the subject in the form of an injectable composition. The composition is preferably administered parenterally, meaning intravenously, intraarterially, intrathecally, interstitially or intracavitarilly. Pharmaceutical compositions of this invention can be administered to mammals including humans in a manner similar to other diagnostic or therapeutic agents. The dosage to be administered, and the mode of administration will depend on a variety of factors including age, weight, sex, condition of the subject and genetic factors, and will ultimately be decided by medical personnel subsequent to experimental determinations of varying dosage as described herein. In general, dosage required for targeted nucleic acid sequence alteration and therapeutic efficacy will range from about 0.001 to 50,000 μg/kg, e.g. between 1 to 250 μg/kg of host cell or body mass or a concentration of between 30 and 60 micromolar.

[0170] For cell administration, direct injection into the nucleus, biolistic bombardment, electroporation, liposome transfer and calcium phosphate precipitation may be used. In yeast, lithium acetate or spheroplast transformation may also be used. In one method, the administration is performed with a liposomal transfer compound, e.g., DOTAP (Boehringer-Mannheim), Lipofectamine™ 2000 (Invitrogen™) or an equivalent such as lipofectin. The amount of the oligonucleotide pair used, for example, is about 500 nanograms in 3 micrograms of DOTAP per 100,000 cells or about 1 microgram with 1 microliter Lipofectamine™ 2000 per 1,000,000 cells. For electroporation, between 20 nanograms and 30 micrograms of oligonucleotide per million cells to be electroporated is an appropriate range of dosages which can be increased to improve efficiency of genetic alteration upon review of the appropriate sequence according to the methods described herein.

[0171] In order that this invention may be better understood, the following examples are set forth. These examples are for purposes of illustration only, and are not to be construed as limiting the scope of the invention in any manner.

### EXAMPLE 1

### Yeast Cell Targeting Assay Method for Nucleic Acid Sequence Alteration and Preferred Oligonucleotide Selection

[0172] In this example, we use single-stranded oligonucleotides to measure oligonucleotide-directed nucleic acid sequence alteration using a Mata wild-type yeast strain with an integrated plasmid with a fusion between a hygromycin resistance gene and eGFP as a target for gene repair (Mata+IntHYG(x)eGFP). Modifications to the oligonucleotides and construction of target vectors are disclosed in WO 01/73002, the disclosure of which is hereby incorporated by reference.

[0173] In vivo assay systems. We monitor targeted alteration of genetic material in yeast using both episomal and chromosomal targets. To monitor gene alteration of episomal targets, we employ a yeast system using the plasmids pAURHYG(rep)eGFP, which contains a point mutation in the hygromycin resistance gene, pAURHYG(ins)eGFP, which contains a single-base insertion in the hygromycin resistance gene and pAURHYG(Δ)eGFP which has a single base deletion (shown in FIG. 1). We also use the same plasmid containing a functional copy of the hygromycin-eGFP fusion gene, designated pAURHYG(wt)eGFP, as a control. These plasmids are collectively designated pAURHYG(x)eGFP. These plasmids also contain an aureobasidinA resistance gene. In pAURHYG(rep)eGFP, hygromycin resistance gene function and green fluorescence from the eGFP protein are restored when a G at position 137, in codon 46 of the hygromycin B coding sequence, is converted to a C thus removing a premature stop codon in the hygromycin resistance gene coding region. In pAURHYG(ins)eGFP, hygromycin resistance gene function and green fluorescence from the eGFP protein are restored when an A inserted between nucleotide positions 136 and 137, in codon 46 of the hygromycin B coding sequence, is deleted and a C is substituted for the T at position 137, thus correcting a frameshift mutation and restoring the reading frame of the hygromycin-eGFP fusion gene. In pAURHYG(Δ)eGFP, hygromycin resistance gene function and green fluorescence from eGFP are restored when a C is inserted at the site of the single nucleotide deletion.

[0174] We synthesize the set of three yeast expression constructs pAURHYG(rep)eGFP, pAURHYG(Δ)eGFP, pAURHYG(ins)eGFP, that contain a point mutation at nucleotide 137 of the hygromycin-B coding sequence as follows: (rep) indicates a T137G replacement, (Δ) represents a deletion of G137 and (ins) represents an A insertion between nucleotides 136 and 137. We construct this set of plasmids by excising the respective expression cassettes by restriction digest from pHyg(x)eGFP and ligation into pAUR123 (Panvera, Calif.). We digest 10 μg pAUR123 vector DNA as well as 10 μg of each pHyg(x)EGFP construct with Kpnl and Sall (NEB). We gel purify each of the DNA fragments and prepare them for enzymatic ligation. We ligate each mutated insert into pAUR123 vector at a 3:1 molar ratio using T4 DNA ligase (Roche). We screen clones by restriction digest, confirm by Sanger dideoxy chain termination sequencing and purify plasmid DNA using a Qiagen maxiprep kit.

[0175] To monitor oligonucleotide-directed alteration of chromosomal nucleic acid sequence targets, we typically employ a yeast system in which we monitor chromosomal genes or we use integrational plasmids such as those designated pAUR101-HYG(x)eGFP. These plasmids do not replicate in yeast. These plasmids comprise the HYG(x)eGFP fusion proteins used in the pAURHYG(x)eGFP episomal plasmid system (shown in FIG. 1) and an aureobasidinA resistance gene. Therefore, like pAURHYG(x)eGFP, these constructs can also be used to monitor all types of gene alterations, i.e. replacements, insertions and deletions. We designate yeast strains into which the pAUR101-HYG(x)eGFP plasmid integrates as “+IntHYG(x)eGFP.” In addition to this construct, we monitor gene alteration of specific yeast genes including, for example, CYC1.

[0176] Oligonucleotide synthesis and cells. We synthesize and purify the chimeric, RNA-DNA oligonucleotides with internally duplexed conformation and single-stranded oligonucleotides (including those with the indicated modifications) using available phosphoramidites on controlled pore glass supports. After deprotection and detachment from the solid support, the oligonucleotides are gel-purified using, for example, procedures such as those described in Gamper et al., Biochem. 39, 5808-5816 (2000), or the oligonucleotides are ion-exchange HPLC-purified. We determine the concentration of the oligonucleotides spectrophotometrically (33 or 40 μg/ml per A₂₆₀ unit of single-stranded or hairpin oligonucleotide, respectively). We introduce the oligonucleotides into yeast cells by electroporation as follows: we prepare electrocompetent yeast cells by inoculating 10 ml of YPD media supplemented with 250 μg/ml aureobasidin from a single colony and grow the cultures overnight with shaking at 300 rpm at 30° C. We pellet the cells from the overnight culture by centrifuging at 3000 rpm for 5 minutes, resuspend the cells in 40 ml YPD media (OD₆₀₀ approximately 0.2). We incubate the cells with shaking at 30° C. until the OD₆₀₀ is between 0.5 and 1.0 (3-5 hours). We wash the cells by centrifuging at 4° C. at 3000 rpm for 5 minutes and twice resuspending the cells in 25 ml ice-cold distilled water. We centrifuge at 4° C. at 3000 rpm for 5 minutes and resuspend in 1 ml ice-cold 1M sorbitol and then finally centrifuge the cells at 4° C. at 5000 rpm for 5 minutes and resuspend the cells in 120 μl 1M sorbitol. To transform electrocompetent cells with plasmids or oligonucleotides, we mix 40 μl of cells with oligonucleotide (typically 5 μg or amounts as indicated) and incubate on ice for 5 minutes. We transfer the mixture to a 0.2 cm electroporation cuvette and electroporate with a BIO-RAD Gene Pulser apparatus at 1.5 kV, 25 μF, 200 Ω for one five-second pulse. We then immediately resuspend the cells in 3 ml YPD media supplemented with 2M sorbitol and incubate the cultures at 30° C. with shaking at 300 rpm for 6 hours. We spread 200 μl of this culture on selective plates containing 300 μg/ml hygromycin and spread 200 μl of a 10⁵ dilution of this culture on selective plates containing 500 ng/ml aureobasidinA and/or and incubate at 30° C. for 3 days to allow individual yeast colonies to grow. We count the colonies on the plates and calculate the gene conversion efficiency by determining the number of hygromycin resistance colonies per 10⁵ aureobasidinA resistant colonies.

[0177] Oligonucleotides direct gene alteration. We use this system to assay the ability of various oligonucleotides (sequences shown in Table 1) to support correction under a variety of conditions. The oligonucleotides are designed so that they can direct correction of the replacement, insertion and deletion mutations in Mata+IntHYG(x)eGFP. The oligonucleotides generally are centered around the base targeted for alteration. In this example, we test the ability of these oligonucleotides to direct alteration of nucleic acid sequence in Mata+IntHYG(rep)eGFP (see Table 2).

[0178] We also use additional oligonucleotides to assay the ability of individual oligonucleotides to correct multiple mutations in both the pAURHYG(x)eGFP plasmid and in yeast strains with integrated copies of pAUR101-HYG(x)eGFP. These include, for example, an oligonucleotide that alters two basepairs that are 3 nucleotides apart with the sequence 5′-CTC GTG CTT TCA GCT TCG ATG TAG GAG GGC GTG GGT ACG TCC TGC GGG TM ATA GCT GCG CCG ATG GTT TCT AC-3′ (SEQ ID NO: _); a 74-mer that alters two basepairs that are 15 nucleotides apart with the sequence 5′-CTC GTG CTT TCA GCT TCG ATG TAG GAG GGC GTG GAT ACG TCC TGC GGG TAA ACA GCT GCG CCG ATG GTT TCT AC-3′ (SEQ ID NO: _); and a 74-mer that alters two basepairs that are 27 nucleotides apart with the sequence 5′-CTC GTG CTT TCA GCT TCG ATG TAG GAG GGC GTG GAT ACG TCC TGC GGG TM ATA GCT GCG CCG ACG GTT TCT AC (SEQ ID NO: _). The nucleotides in these oligonucleotides that direct alteration of the target sequence are in boldface. These oligonucleotides are chemically modified to enable them to effect oligonucleotide-directed nucleic acid sequence alteration.

TABLE 1
Oligonucleotides used in Examples 1 and 2

| | | | |
|---|---|---|---|
| Name | Size | Sequence | SEQ ID NO: |

| | | |
|---|---|---|
| Hyg3S/74T | 74 mer | 5′-C*T*C* GTG CTT TCA GCT TCG ATG TAG GAG |
| | | GGC GTG GAT ACG TCC TGC GGG TAA ATA GCT |
| | | GCG CCG ATG GTT TC *T*A*C-3′ |
| Hyg3S/74NT | 74 mer | 5′-G*T*A* GAA ACC ATC GGC GCA GCT ATT TAC |
| | | CCG CAG GAC GTA TCC ACG CCC TCC TAC ATC |
| | | GAA GCT GAA AGC AC*G *A*G-3′ |

[0179] Phosphorothioate linkages are indicated as “*” between the bases. The base corresponding to the location of the replacement mutation in the Hyg(rep) target is in bold.

TABLE 2
Gene alteration in Mata+IntHYG(rep)eGFP

| Oligonucleotide | Alteration per 10⁵ | Fold correction (relative to |
|---|---|---|
| assayed | Aureobasidin^{R} colonies¹ | Hyg3S/74T) |
| Hyg3S/74T | 0.22 ± 0.3 | 1x |
| Hyg3S/74NT | 0.89 ± 1.3 | 4.0x |

¹These numbers represent an average of four experiments with the standard deviation indicated for alteration efficiency.

### EXAMPLE 2

### Selection for a First Alteration Reduces Screening Required to Identify a Second Alteration in the Same Cell

[0180] In this example we demonstrate that the efficiency of alteration of nucleic acid sequence at a second site is enhanced in a population of nucleic acid molecules that have been previously selected for alteration at a first target site. We use yeast strains having an integrated copy of the pAUR101-HYG(rep)eGFP plasmid described in Example 1 that also contain the βS YAC (230 kb YAC comprising the human β-globin gene). In some experiments, the yeast strains also contain a plasmid that overexpresses yeast Rad51, designated pYNARad51. We use several oligonucleotides: Hyg3S/74NT, which, as described in Example 1, is capable of directing alteration of the mutated Hyg(x)eGFP target to confer hygromycin resistance; and βS-386m and βS-378m, each of which is a 71-mer oligonucleotide with 3 phosphorothioate linkages on each end, which is capable of directing a mutation in the human β-globin gene. The sequence of βS-386m is 5′-G*C*C* TCA CCA CCA ACT TCA TCC ACG TTC ACC TTG CCT CAC AGG GCA GTA ACG GCA GAC TTC TCC ACA GG*A *G*T-3′ (SEQ ID NO: _) and the sequence of βS-378m is 5′-T*A*A* CGG CAG ACT TCT CCA CAG GAG TCA GGT GCA CCG TGG TGT CTG TTT GAG GTT GCT AGT GAA CAC AG*T *T*G-3′ (SEQ ID NO: _). βS-386m and βS-378m both hybridize to the non-transcribed sequence of the human β-globin gene and direct a nucleic acid sequence alteration that creates a β-thalassemia mutation: βS-386m converts a TGG codon to a stop codon (TGA) and βS-378m converts the ATG start codon to ACG.

[0181] We introduce the oligonucleotides into the yeast cells by electroporation as follows: we prepare electrocompetent yeast cells by inoculating a single colony into 10 ml of appropriate media supplemented with 250 μg/ml aureobasidin and grow the cultures overnight with shaking at 300 rpm at 30° C. In this Example, we use YPD media unless the cells contain a plasmid to overexpress a repair protein when we use SC-ade media. We dilute the cells into 40 ml media to an initial OD₆₀₀ of approximately 0.15. We incubate the cells with shaking at 30° C. until the OD₆₀₀ is approximately 0.25 and, in some experiments, we add 100 mM hydroxyurea (HU). We continue to incubate the cells with shaking at 30° C. until the OD₆₀₀ is approximately 0.6. We spin down the cells at 3000 rpm for 5 minutes and resuspend in 1 ml YPD supplemented with 25 μl 1M DTT and incubate the culture with shaking at 30° C. for 20 minutes. We wash the cells four times by centrifuging at 4° C. at 3000 rpm for 5 minutes and resuspending the cells twice in 25 ml ice-cold distilled water; once in 25 ml ice-cold 1M sorbitol; and once in 1 ml ice-cold 1M sorbitol. We centrifuge the cells at 4° C. at 5000 rpm for 5 minutes and resuspend the cells in 120 μl 1M sorbitol. We transform the electrocompetent cells with Hyg3S/74NT and either βS-386m or βS-378m by mixing 40 μl of cells with 30 μg oligonucleotide (or 30 μg of each oligonucleotide) and incubate on ice for 5 minutes. We transfer the mixture to a 0.2 cm electroporation cuvette and electroporate with a BIO-RAD® Gene Pulser® apparatus at 1.5 kV, 25 μF, 200 Ω for one approximately five-second pulse. We then resuspend the cells in 3 ml YPD media supplemented with Aureobasidin and allow the cells to recover by incubating them overnight at 30° C. with shaking at 300 rpm. In some experiments, we supplement the culture with 50 mg/ml Trichostatin A (TSA) during this recovery phase. We spin down the cells, resuspend in 1 ml YPD and spread 100 μl of this culture (and/or 100 μl of 10¹ or 10² dilutions) on selective plates containing 300 μg/ml hygromycin and spread 200 μl of a 10⁵ dilution of this culture on selective plates containing 500 ng/ml aureobasidinA and incubate at 30° C. for 3 days to allow individual yeast colonies to grow. We count the colonies on the plates and calculate the conversion efficiency for the hygromycin target by determining the number of hygromycin resistance colonies per 10⁵ aureobasidinA resistant colonies. We pick individual colonies from YPD-hygromycin plates into 96-well plates with 150 μl YPD/well and allow the cells to grow overnight at 30° C. We screen individual wells for alteration of the β-globin target in the βS YAC as follows: we PCR amplify a 345 bp fragment of the β-globin gene using forward primer PCO2; 5′-TCC TAA GCC AGT GCC AGA AGA-3′ (SEQ ID NO: _) and reverse primer PCO5; 5′-CTA TTG GTC TCC TTA MC CTG-3′ (SEQ ID NO: _) and purify the PCR product. We analyze the sequence at the target nucleotide in the PCR products by SNaPshot™ analysis on an ABI3100 (Applied Biosystems™) using primers corresponding to the different alterations directed by βS-386m and βS-378m as follows: 386RC; 5′-CCC CCC CCC CCC CCC CCA AGT CTG CCG TTA CTG CCC TGT G-3′ (SEQ ID NO: _) and 378MF; 5′-TTT TTT TTT TTT TTT TTT TTT TTT TTT TTT TTT TGC AAC CTC AAA CAG ACA CCA-3′ (SEQ ID NO: _).

[0182] As shown in Tables 3 and 4, we observe that the alteration efficiency of the β-globin gene is approximately 10-fold higher than for alteration of the hygromycin target. We observe this result with both βS-386m and βS-378m as well as in the presence or absence of additional factors that enhance oligonucleotide-directed nucleic acid sequence alteration such as, e.g., overexpression of Rad51.

[0183] In other experiments, we do the experiments in yeast strains overexpressing other repair protein(s) in place of or in addition to Rad51and/or yeast strains with one or more mutations in repair proteins. We also do experiments where we add other compounds that enhance oligonucleotide-directed nucleic acid sequence alteration such as histone deacetylase inhibitors and the bacteriophage lambda beta protein.

TABLE 3
βS-386m Experiment

| | | Hygromycin | β-globin |
|---|---|---|---|
| | | Alteration | Alteration |
| Yeast Strain and treatment | Oligonucleotide(s) | Efficiency (/10⁵) | Efficiency |
| Mata−intHyg(rep)eGFP/βYAC (HU + TSA) | Hyg3S/74NT | 12.35 | NA |
| Mata−intHyg(rep)eGFP/βYAC (HU + TSA) | Hyg3S/74NT + βS-386m | 30.51 | 0.0031 |
| Mata−intHyg(rep)eGFP/βYAC | Hyg3S/74NT | 3.22 | NA |
| Mata−intHyg(rep)eGFP/βYAC | Hyg3S/74NT + βS-386m | 5.07 | ND |

NA = not applicable;
ND = not determined

[0184] TABLE 4
βS-378m Experiment

| | | Hygromycin | β-globin |
|---|---|---|---|
| | | Alteration | Alteration |
| Yeast Strain and treatment | Oligonucleotide(s) | Efficiency (/10⁵) | Efficiency |
| Mata−intHyg(rep)eGFP/βYAC | Hyg3S/74NT + βS-378m | 44.58 | ND |
| (HU + TSA) | | | |
| Mata−intHyg(rep)eGFP/βYAC | Hyg3S/74NT | 12.79 | NA |
| (HU + TSA) | | | |
| Mata−intHyg(rep)eGFP/βYAC | KanUD3/71 | 0.00 | NA |
| (HU + TSA) | | | |
| Mata−intHyg(rep)eGFP/βYAC + pYNARad51 | Hyg3S/74NT + βS-378m | 123.73 | 0.15 |
| (HU + TSA) | | | |
| Mata−intHyg(rep)eGFP/βYAC + pYNARad51 | Hyg3S/74NT | 96.96 | NA |
| (HU + TSA) | | | |
| Mata−intHyg(rep)eGFP/βYAC + pYNARad51 | KanUD3/71 | 0.01 | NA |
| (HU + TSA) | | | |

NA = not applicable;
ND = not determined;
KanUD3/71 is a negative control oligonucleotide

### EXAMPLE 3

### Selection for a First Alteration Reduces Screening Required to Identify a Second Alteration in Human Blood Cells

[0185] Assay system. We monitor targeted alteration of genetic material in human blood cells using the chromosomal gene encoding the beta subunit of hemoglobin as the target. We cointroduce two oligonucleotides with a plasmid comprising a mutant copy of the green fluorescent protein (GFP) gene. The second oligonucleotide is designed to direct an alteration which repairs the mutant GFP resulting in fluorescence. The first oligonucleotide is designed to convert the wild-type allele to the sickle allele. We use first oligonucleotides that correspond in sequence to the wild-type allele at all positions except the single nucleotide position designed to introduce the sickle mutation into the gene. Therefore, these oligonucleotides are identical to the oligonucleotides described in Example 6 and shown in Table 7 except for a single base. For example, we use first oligonucleotides selected from: 5′-C*A*A* CCT CAA ACA GAC ACC ATG GTG CAC CTG ACT CCT GtG GAG MG TCT GCC GTT ACT GCC CTG TGG GGC AA*G *G*T-3′; SEQ ID NO: _; 5′-A*C*C* TTG CCC CAC AGG GCA GTA ACG GCA GAC TTC TCC aCA GGA GTC AGG TGC ACC ATG GTG TCT GTT TGA GG*T *T*G-3′; SEQ ID NO: _; 5′-ACC TCA AAC AGA CAC CAT GGT GCA CCT GAC TCC TGt GGA GAA GTC TGC CGT TAC TGC CCT GTG GGG CAA GG -3′; SEQ ID NO: _; 5′-G*A*C* ACC ATG GTG CAC CTG ACT CCT GtG GAG AAG TCT GCC GTT ACT GCC *C*T*G-3′; SEQ ID NO: _; and 5′-A*C*C* TCA AAC AGA CAC CAT GGT GCA CCT GAC TCC TGt GGA GAA GTC TGC CGT TAC TGC CCT GTG GGG CA*A *G*G -3′. The bases in the oligonucleotides which are mismatched to the wild-type allele are shown in lowercase. The oligonucleotides are synthesized with three phosphorothioate linkages on each end (represented with asterisks) or with a single LNA base at each end (bold).

[0186] Preparation and treatment of cells. We thaw and electroporate cells as follows. We warm QBSF-60 medium (Quality Bio) containing 10% FCS (StemCell Technologies) to 37° C. We quickly thaw frozen G-CSF mobilized peripheral blood CD-34+cells (BioWhittaker) in a 37° C. water bath, wipe the outside of the tube with 70% ethanol and aseptically transfer about 2 ml (approximately 1×10⁶ cells) of cell suspension to a 15 ml or 50 ml conical tube. We rinse the vial in 1 ml of medium and add it dropwise to the cells, gently swirling the conical tube every few drops. We slowly add medium dropwise until the volume is about 5 ml, still gently swirling the conical tube every few drops, and then slowly bring the volume up to fill the tube by adding 1-2 ml of medium dropwise, swirling after every addition. We centrifuge the cell suspension at 200×g (1500 rpm) for 15 minutes at room temperature. We use a pipet to remove most of the wash to a second tube, leaving a few ml behind to avoid disturbing the cell pellet. We resuspend the pellet in the remaining medium and transfer to a 15 ml conical tube. We rinse the original tube with 5 ml medium and add the wash to the cells dropwise, swirling gently after each addition, and recentrifuge at 200×g for 15 minutes. We pipet off all but 2 ml of the wash and gently resuspend the cells in the remaining medium and count them. We rest the cells at 37° C. and 5% CO₂ for 1 hour and then recount the cells. We add 5 ml QBSF-60 medium without FCS containing the cytokines fit-3, SCF and TPO at 100 ng/ml final concentration (Stem Cell Technologies), repellet the cells at 200×g (1500 rpm for 15 min), and gently remove as much liquid volume as possible without disturbing the pellet. We resuspend the cells at about 5×10⁵-1×10⁶ cells/ml and transfer them to 6-well tissue culture treated dishes. We stimulate the cells for three days with cytokines (QBSF-60 medium without FCS containing the cytokines flt-3, SCF and TPO at 100 ng/ml final concentration) and perform a cell count using trypan blue exclusion staining. We centrifuge the cells at 200×g (1500 rpm) for 15 minutes. We remove the excess volume by pipet and resuspend the cells in the same medium at 2×10⁶ cells/ml.

[0187] We electroporate the oligonucleotides and the GFP plasmid into the cells under square wave conditions as follows. We add 250 μl cell suspension, 5 μg GFP plasmid and 30 μg each oligonucleotide to a 2 mm gap cuvette and electroporate for one 19 msec pulse at 220 V. We then add 750 μl Iscove's Medium (Invitrogen™), 10% FCS (StemCell Technologies) and the cytokines flt-3, SCF, and TPO at 100 ng/ml final concentration, glutamine and penicillin/streptomycin. Alternatively, we add 250 μl cell suspension, 250 μl QBSF-60 medium supplemented with flt-3, SCF and TPO and 30 μg oligonucleotide to a 4 mm gap cuvette and electroporate for five 19 msec pulse at 220 V with a pulse interval of 1 sec. We then add 500 μl Iscove's Medium (Invitrogen™), 10% FCS (StemCell Technologies) and the cytokines flt-3, SCF and TPO at 100 ng/ml final concentration. We select for the repair of the mutant GFP protein using by FACS and analyze the sequence of the hemoglobin target by PCR amplification and analysis on the SNapShot™ device using two oligonucleotides: 5′-TTT TTT TTT TTT TTT GAC ACC ATG GTG CAC CTG ACT CCT G -3′; SEQ ID NO _; and 5′-TTT TTT TTT TTT TTT TTT TTC AGT AAC GGC AGA CTT CTC C-3′; SEQ ID N _. As we see in other cells, these oligonucleotides direct targeted alteration in human blood cells.

### EXAMPLE 4

### Use of HU and TSA in Dual Targeting Experiments

[0188] The efficiency of targeted alteration can be increased and the cost decreased by using at least two unrelated oligonucleotides simultaneously in dual targeting experiments. In this approach, alteration by a first oligonucleotide confers a selectable phenotype that is selected for. Alterations directed by a second oligonucleotide are then screened for from within this selected population. Because the population identified by selective pressure is enriched for cells that bear an edited base at the non-selective site, the approach is useful as a method, termed gene editing, for rapidly and efficiently introducing a single nucleotide polymorphism of choice into virtually any gene at any desired location using modified single-stranded oligonucleotides.

[0189] The dual targeting strategy is illustrated in FIG. 2A. The LSY678intHyg(rep)βstrain (Table 5) contains a 240 kb human β^{s}-globin YAC and a cassette containing a chromosomal hygromycin-resistance gene inactivated by a single base mutation and a functional aureobasidin-resistance gene. See Liu et al., Nucleic Acids Res. 31:2742-2750 (2002); Parekh-Olmedo et al., Chem. Biol. 9:1073-1084 (2002); and Liu et al., Mol. Cell Biol. 22:3852-3863 (2002). FIG. 2B shows the oligonucleotide that is used to direct editing of the chromosomal hygromycin mutant gene. Hyg3S/74NT (SEQ ID NO: _) is a 74-mer that is specific for inding to the nontranscribed strand and contains three terminal phosphorothioate linkages. Id. Also shown is the target sequence of the mutant, which contains a TAG stop codon. FIG. 2C illustrates the structure of the β-globin YAC and nucleotides targeted for editing are specified. The two nonselectable changes are directed by different oligonucleotides, βThal1 (SEQ ID NO: _) and βThal2 (SEQ ID NO: _), in separate experiments. The YAC contains approximately 230 kb of genomic DNA from human chromosome 11, indicated by the shaded region. The unshaded regions represent the yeast sequences that are on either end of the YAC (not drawn to scale). Yu et al., Proc. Natl. Acad. Sci. USA 97:5978-5983 (2000). A portion of the β-globin sequence is shown, beginning with the start codon. βThal1 directs a change from a G to an A while βThal2 directs a change from a T to a C. The sequences of the oligonucleotides having nucleic acid sequence alteration activity are shown and are designed to bind to the non-transcribed strand, relative to human transcription of the β-globin locus. Both changes result in single-base substitutions that have been documented to result in β-thalassemia in humans.

[0190] For editing experiments, YAC-containing LSY678IntHyg(rep)βcells (Table 5) are grown in the presence of HU, electroporated with the selectable and nonselectable oligonucleotides, and allowed to recover in the presence of TSA (FIG. 2A). Because the human β-globin gene is likely to be transcriptionally inactive in yeast, HU and TSA are especially important in increasing target accessibility. The results of dual targeting experiments are presented in FIG. 3A. Hygromycin-resistant colonies are observed when the oligonucleotide, Hyg3S/74NT, is used. The ratio of hygromycin-resistant colonies to aureobasidin-resistant colonies is referred to as the correction efficiency (C.E.). The presence of HU and TSA leads to an increase in the C.E. of the hygromycin mutation, here about 4- to 6-fold. In this experiment, hygromycin-resistant colonies are found at roughly 1 per 3000 aureobasidin-resistant colonies. Hygromycin-resistant colonies are then analyzed for second-site editing in the YAC β-globin gene. The βThal1 oligonucleotide is designed to direct the replacement of a G in TGG codon 16 of exon 1 with an A, giving the stop codon TGA (FIG. 2C). FIG. 3B shows an ABI SNaPshot (middle panels) and direct DNA sequence (bottom panel) of a region of the b-globin gene in a corrected colony from this experiment; in both, the G to A change is evident. Of those colonies that are corrected in the hygromycin mutation, 1 in 325 also contain the second change in the YAC β-globin sequence. Thus, approximately 10% of the cells with the corrected hygromycin-resistance gene also contain the edited β-globin gene.

[0191] As shown in various experiments above, overexpression of RAD51 consistently increases the frequency of chromosomal gene editing. Accordingly, we introduce an expression plasmid containing the yeast RAD51 gene into LSY678IntHyg(rep)β cells (Table 5). FIG. 4 shows results of dual targeting in this strain and, as expected, expression of RAD51 increases the hygromycin correction efficiency of oligonucleotide Hyg3S/74NT (compare with FIG. 3). For these editing experiments, YAC-containing LSY678IntHyg(rep)β cells (Table 5) are grown in the presence of HU, electroporated with the selectable and nonselectable oligonucleotides, and allowed to recover in the presence of TSA (FIG. 2A). Here too, addition of a second oligonucleotide, βThal2, increases the correction efficiency further, to roughly 1 hygromycin-resistant colony per 800 aureobasidin-resistant colonies.

[0192] The βThal2 oligonucleotide is designed to direct the replacement of a T in the initiator ATG codon of exon 1 with a C, giving the non-initiator codon ACG (FIG. 2). FIG. 4B shows an ABI SNaPshot (middle panels) and direct DNA sequence (bottom panel) of the β-globin gene from a corrected Hyg^{r} colony; the T to C change is evident in both analytical panels. Importantly, of those colonies that are corrected in the hygromycin mutation, 1 in 70 also contain the second single-base change in the YAC β-globin sequence. Thus, the dual targeting approach is again successful; approximately 10% of the cells bearing the corrected hygromycin also contain the edited β-globin gene. In addition, in the presence of high levels of Rad51, gene editing occurs at a higher level, indicating that the presence of HU, TSA, and RAD51 overexpression exhibit synergistic effects on the overall process.

TABLE 5
Genotype of yeast strains

| Strain | Genotype/Description |
|---|---|
| AB1380 | MATa ura3 trp1 ade2-1 can1-100 lys2-1 his5 ψ+ |
| LSY678 | MATa ura3 trp1-1 ade2-1 leu2-3, 112 can1 his3-11, 15 |
| LSY678IntHyg(rep) | LSY678 with mutant hygromycin gene and functional |
| | aureobasidin-resistance gene integrated into the AUR-1 |
| | locus on chromosome XI |
| LSY678IntHyg(rep)β | LSY678IntHyg(rep) with 250 kb YAC containing the human |
| | β-globin locus |
| LSY678IntHyg(rep)β + pYNARAD51 | The above strain containing an episomal expression |
| | plasmid overexpressing RAD51 |

[0193] Strains. The genotypes of the yeast strains used in these studies are listed in Table 5. Details of the LSY678IntHyg(rep) strain are published in Liu et al., Mol. Cell Biol. 22:3852-3863 (2002).

[0194] YAC Manipulations. The β-globin YAC is isolated from a preparative pulsed-field gel as described in Gnirke et al., Genomics 15:659-667 (1993). Briefly, concentrated chromosomal DNA from the βS-YAC strain (AB1380 background, see Chang et al., Proc. Natl. Acad. Sci. USA 95:14886-14890 (1998)) is prepared and resolved on a 1% low-melt agarose pulsed-field gel at 200V, 14° C., 20-50 s, 33 hours. The YAC is isolated, equilibrated with a modified agarase buffer (10 mM BisTris-HCl pH6.5, 1 mM EDTA, 100 mM NaCl), treated with β-agarase I (New England Biolabs), and concentrated to a final volume of ˜200 μl. Thirty βl of the purified YAC are introduced into competent LSY678IntHyg(rep) cells by spheroplast transformation and selection on agar/sorbitol plates lacking tryptophan. Transformants are restreaked and confirmed by pulsed-field gel electrophoresis, PCR, and sequence analysis for a fragment of the human β-globin gene.

[0195] The pYNARad51 episomal expression plasmid is constructed by replacing the TRP1 gene of pYNRad51 (see Liu et al., Nucleic Acids Res. 31, 2742-2750 (2002)) with the ADE2 gene. pYNARad51 is introduced into LSY678IntHyg(rep)β by electroporation and selection on agar plates lacking adenine.

[0196] Oligonucleotides. Hyg3S/74NT (SEQ ID NO: _), βThal1 (SEQ ID NO: _), and βThal2 (SEQ ID NO: _) are ordered from IDT with HPLC purification. Hyg3S/74NT is a 74mer and both βThal1 and βThal2 are 71mers; all three oligonucleotides have three phosphorothioate linkages at the 5′ and 3′ ends (FIG. 2).

[0197] Dual Targeting. The dual targeting protocol is outlined in FIG. 2A. LSY678IntHyg(rep)β cells are grown overnight in 10 ml YPD media at 30° C. The culture is diluted to OD₆₀₀ ˜0.15-0.20 in 40 ml YPD media and grown for one doubling time to OD₆₀₀ ˜0.3-0.4. 100 mM HU is added to the culture and the cells are grown for one doubling time to OD_{600 ˜0.6}-0.8. Cells are harvested and resuspended in 1 ml YPD containing 25 μl 1M DTT and grown for an additional 20 minutes at 30° C. The cells are washed twice with 25 ml cold dH₂0 and once with 25 ml cold 1M sorbitol. The cells are resuspended gently in 1 ml cold 1M sorbitol, spun for 5 minutes at 5000 rpm in a microcentrifuge, and resuspended in 120 μl 1M sorbitol. Forty microliters of cells are electroporated with 30 μg of each oligonucleotide in a 2 mm gap cuvette using a Bio-Rad Gene Pulser apparatus (Richmond, Calif.) with 1.5 kV, 25 μF, 200Ω, 1 pulse, 5 s/pulsed length. The cells are immediately resuspended in 3 ml YPD with 0.8 μg/ml aureobasidin A and 50 μg/ml TSA and recovered overnight at 30° C. The cells are spun down and resuspended in 1 ml fresh YPD. Dilutions are plated on YPD agar plates containing either hygromycin (300 μg/ml) or aureobasidin A (0.5 μg/ml). Correction efficiencies (C.E.s) are determined based on the number of hygromycin-resistant colonies per aureobasidin-resistant colonies.

[0198] Individual colonies are picked from the hygromycin agar plates into 96-well plates (Corning) containing 150 μl YPD and grown overnight at 30° C. with shaking. A 345 bp PCR product specific for the human β-globin locus is amplified from each of the 96 wells using the primers PCO2 (5′-TCCTAAGCCAGTGCCAGAAG-3′ (SEQ ID NO.: _)) and PCO5 (5′-CTATTGGTCTCCTTAAACCTG-3′ (SEQ ID NO.: _)) in order to screen for the βThal1 or βThal2 conversion. The PCR reactions are performed by adding 8 pmoles of each primer and 2.5 μl yeast cell culture into pre-aliquoted PCR reaction mixes (Marsh/Abgene). The PCR reactions use an annealing temperature of 45.8° C. and an extension time of 1 min for 35 cycles. The PCR reactions are purified using a QiaQuick PCR 96-well purification kit (Qiagen) and eluted in a volume of 80 μl. One microliter of the purified PCR product is used as a template for the ABI SNaPshot reaction. The sequence of the SNaPshot primer used to screen for the βThal1 conversion is: 5′-CCCCCCCCCCCCCCCCCAAGTCTGCCGTTACTGCCCTGTG-3′ (SEQ ID NO: _). The sequence of the SNaPshot primer used to screen for the βThal2 conversion is: 5′-TTTTTTTTTTTTTTTTTTTTTTTTTTTTTTTTTTCCACAGGAGTCAGGTGCACC-3′ (SEQ ID NO: _). The SNaPshot reactions are performed using an ABI Prism SNaPshot Multiplex Kit, as specified by the manufacturer, and analyzed on an ABI 3100 Genetic Analyzer.

[0199] Sequence Analysis. Any potential converted clones from the SNaPshot reactions are confirmed by sequence analysis. Both strands of the PCR products are sequenced using primers PCO2 and PCO5 by Sanger dideoxy sequencing using an ABI Prism kit, as specified by the manufacturer, on an automated ABI 3100 Genetic Analyzer.

### EXAMPLE 5

### Adenosine Deaminase (ADA)

[0200] Adenosine deaminase (ADA, EC 3.5.4.4) catalyses the deamination of adenosine and 2′-deoxyadenosine to inosine or 2′-deoxyinosine respectively. ADA deficiency has been identified as the metabolic basis for 20-30% of cases with recessively inherited severe combined immunodeficiency (SCID). Affected infants are subject to recurrent chronic viral, fungal, protozoal, and bacterial infections and frequently present with persistent diarrhea, failure to thrive and candidiasis. In patients homozygous for ADA deficiency, 2′-deoxyadenosine accumulating during the rapid turnover of cells rich in DNA is converted back to dATP, either by adenosine kinase or deoxycytidine kinase. Many hypotheses have been advanced to explain the specific toxicity to the immune system in ADA deficiency. The apparently selective accumulation of dATP in thymocytes and peripheral blood B cells, with resultant inhibition of ribonucleotide reductase and DNA synthesis is probably the principal mechanism.

[0201] The structural gene for ADA is encoded as a single 32 kb locus containing 12 exons. Studies of the molecular defect in ADA-deficient patients have shown that mRNA is usually detectable in normal or supranormal amounts. Specific base substitution mutations have been detected in the majority of cases with the complete deficiency. A C-to-T base substitution mutation in exon 11 accounts for a high proportion of these, whilst a few patients are homozygous for large deletions encompassing exon 1. A common point mutation resulting in a heat-labile ADA has been characterised in some patients with partial ADA deficiency, a disorder with an apparently increased prevalence in the Caribbean.

[0202] As yet no totally effective therapy for ADA deficiency has been reported, except in those few cases where bone marrow from an HLA/MLR compatible sibling donor was available.

[0203] Two therapeutic approaches have provided long-term benefit in specific instances. First, reconstitution using T cell depleted mismatched sibling marrow has been encouraging, particularly in early presenters completely deficient in ADA. Secondly, therapy with polyethylene glycol-modified adenosine deaminase (PEG-ADA) for more than 5 years has produced a sustained increase in lymphocyte numbers and mitogen responses together with evidence of in vivo B cell function. Success has generally been achieved in late presenters with residual ADA activity in mononuclear cells.

[0204] ADA deficiency has been chosen as the candidate disease for gene replacement therapy and the first human experiment commenced in 1990. The clinical consequences of overexpression of ADA activity—one of the potential hazards of gene implant—are known and take the form of an hereditary haemolytic anaemia associated with a tissue-specific increase in ADA activity. The genetic basis for the latter autosomal dominant disorder seemingly relates to markedly increased levels of structurally normal ADA mRNA.

TABLE 6
ADA Mutations and Genome-Correcting Oligos

| | | |
|---|---|---|
| Clinical Phenotype & | | SEQ ID |
| Mutation | Correcting Oligos | NO: |

| | | |
|---|---|---|
| Adenosine deaminase | AGAGACCCACCGAGCGGCGGCGGAGGGAGCAGCGCCGGGG | 1 |
| deficiency | CGCACGAGGGCACCATGGCCCAGACGCCCGCCTTCGACAAG | |
| GLN3TERM | CCCAAAGTGAGCGCGCGCGGGGGCTCCGGGGACGGGGGTC | |
| CAG to TAG | GACCCCCGTCCCCGGAGCCCCCGCGCGCGCTCACTTTGGGC | 2 |
| | TTGTCGAAGGCGGGCGTCTGGGCCATGGTGCCCTCGTGCGC | |
| | CCCGGCGCTGCTCCCTCCGCCGCCGCTCGGTGGGTCTCT | |
| | CCATGGCCCAGACGCCC | 3 |
| | GGGCGTCTGGGCCATGG | 4 |
| Adenosine deaminase | TATTTGTTCTCTCTCTCCCTTTCTCTCTCTCTTCCCCCTGCCCC | 5 |
| deficiency | CTTGCAGGTAGAACTGCATGTCCACCTAGACGGATCCATCAA | |
| HIS15ASP | GCCTGAAACCATCTTATACTATGGCAGGTAAGTCC | |
| CAT to GAT | GGACTTACCTGCCATAGTATAAGATGGTTTCAGGCTTGATGGA | 6 |
| | TCCGTCTAGGTGGACATGCAGTTCTACCTGCAAGGGGGCAG | |
| | GGGGAAGAGAGAGAGAAAGGGAGAGAGAGAACAAATA | |
| | TAGAACTGCATGTCCAC | 7 |
| | GTGGACATGCAGTTCTA | 8 |
| Adenosine deaminase | TCCCTTTCTCTCTCTCTTCCCCCTGCCCCCTTGCAGGTAGAAC | 9 |
| deficiency | TGCATGTCCACCTAGACGGATCCATCAAGCCTGAAACCATCTT | |
| GLY20ARG | ATACTATGGCAGGTAAGTCCATACAGAAGAGCCCT | |
| GGA to AGA | AGGGCTCTTCTGTATGGACTTACCTGCCATAGTATAAGATGGT | 10 |
| | TTCAGGCTTGATGGATCCGTCTAGGTGGACATGCAGTTCTAC | |
| | CTGCAAGGGGGCAGGGGGAAGAGAGAGAGAAAGGGA | |
| | ACCTAGACGGATCCATC | 11 |
| | GATGGATCCGTCTAGGT | 12 |
| Adenosine deaminase | CCTGGAGCTCCCAAGGGACTTGGGGAAGGTTGTTCCCAACC | 13 |
| deficiency | CCTTTCTTCCCTTCCCAGGGGCTGCCGGGAGGCTATCAAAAG | |
| GLY74CYS | GATCGCCTATGAGTTTGTAGAGATGAAGGCCAAAGAGG | |
| GGC to TGC | CCTCTTTGGCCTTCATCTCTACAAACTCATAGGCGATCCTTTT | 14 |
| | GATAGCCTCCCGGCAGCCCCTGGGAAGGGAAGAAAGGGGTT | |
| | GGGAACAACCTTCCCCAAGTCCCTTGGGAGCTCCAGG | |
| | CTATCGCGGGCTGCCGG | 15 |
| | CCGGCAGCCCGCGATAG | 16 |
| Adenosine Deaminase | GCTCCCAAGGGACTTGGGGAAGGTTGTTCCCAACCCCTTTCT | 17 |
| Deficiency | TCCCTTCCCAGGGGCTGCCGGGAGGCTATCAAAAGGATCGC | |
| ARG76TRP | CTATGAGTTTGTAGAGATGAAGGCCAAAGAGGGCGTGG | |
| CGG to TGG | CCACGCCCTCTTTGGCCTTCATCTCTACAAACTCATAGGCGAT | 18 |
| | CCTTTTGATAGCCTCCCGGCAGCCCCTGGGAAGGGAAGAAA | |
| | GGGGTTGGGAACAACCTTCCCCAAGTCCCTTGGGAGC | |
| | GGGGCTGCCGGGAGGCT | 19 |
| | AGCCTCCCGGCAGCCCC | 20 |
| Adenosine Deaminase | TTGGGGAAGGTTGTTCCCAACCCCTTTCTTCCCTTCCCAGGG | 21 |
| Deficiency | GCTGCCGGGAGGCTATCAAAAGGATCGCCTATGAGTTTGTAG | |
| LYS80ARG | AGATGAAGGCCAAAGAGGGCGTGGTGTATGTGGAGGT | |
| AAA to AGA | ACCTCCACATACACCACGCCCTCTTTGGCCTTCATCTCTACAA | 22 |
| | ACTCATAGGCGATCCTTTTGATAGCCTCCCGGCAGCCCCTGG | |
| | GAAGGGAAGAAAGGGGTTGGGAACAACCTTCCCCAA | |
| | GGCTATCAAAAGGATCG | 23 |
| | CGATCCTTTTGATAGCC | 24 |
| Adenosine deaminase | GTTGTTCCCAACCCCTTTCTTCCCTTCCCAGGGGCTGCCGGG | 25 |
| deficiency | AGGCTATCAAAAGGATCGCCTATGAGTTTGTAGAGATGAAGG | |
| ALA83ASP | CCAAAGAGGGCGTGGTGTATGTGGAGGTGCGGTACAG | |
| GCC to GAC | CTGTACCGCACCTCCACATACACCACGCCCTCTTTGGCCTTC | 26 |
| | ATCTCTACAAACTCATAGGCGATCCTTTTGATAGCCTCCCGGC | |
| | AGCCCCTGGGAAGGGAAGAAAGGGGTTGGGAACAAC | |
| | AAGGATCGCCTATGAGT | 27 |
| | ACTCATAGGCGATCCTT | 28 |
| Adenosine deaminase | AGGCTATCAAAAGGATCGCCTATGAGTTTGTAGAGATGAAGG | 29 |
| deficiency | CCAAAGAGGGCGTGGTGTATGTGGAGGTGCGGTACAGTCCG | |
| TYR97CYS | CACCTGCTGGCCAACTCCAAAGTGGAGCCAATCCCCTG | |
| TAT to TGT | CAGGGGATTGGCTCCACTTTGGAGTTGGCCAGCAGGTGCGG | 30 |
| | ACTGTACCGCACCTCCACATACACCACGCCCTCTTTGGCCTT | |
| | CATCTCTACAAACTCATAGGCGATCCTTTTGATAGCCT | |
| | CGTGGTGTATGTGGAGG | 31 |
| | CCTCCACATACACCACG | 32 |
| Adenosine deaminase | GGATCGCCTATGAGTTTGTAGAGATGAAGGCCAAAGAGGGCG | 33 |
| deficiency | TGGTGTATGTGGAGGTGCGGTACAGTCCGCACCTGCTGGCC | |
| ARG101GLN | AACTCCAAAGTGGAGCCAATCCCCTGGAACCAGGCTGA | |
| CGG to CAG | TCAGCCTGGTTCCAGGGGATTGGCTCCACTTTGGAGTTGGCC | 34 |
| | AGCAGGTGCGGACTGTACCGCACCTCCACATACACCACGCC | |
| | CTCTTTGGCCTTCATCTCTACAAACTCATAGGCGATCC | |
| | GGAGGTGCGGTACAGTC | 35 |
| | GACTGTACCGCACCTCC | 36 |
| Adenosine deaminase | GGATCGCCTATGAGTTTGTAGAGATGAAGGCCAAAGAGGGCG | 37 |
| deficiency | TGGTGTATGTGGAGGTGCGGTACAGTCCGCACCTGCTGGCC | |
| ARG101LEU | AACTCCAAAGTGGAGCCAATCCCCTGGAACCAGGCTGA | |
| CGG to CTG | TCAGCCTGGTTCCAGGGGATTGGCTCCACTTTGGAGTTGGCC | 38 |
| | AGCAGGTGCGGACTGTACCGCACCTCCACATACACCACGCC | |
| | CTCTTTGGCCTTCATCTCTACAAACTCATAGGCGATCC | |
| | GGAGGTGCGGTACAGTC | 39 |
| | GACTGTACCGCACCTCC | 40 |
| Adenosine deaminase | AGGATCGCCTATGAGTTTGTAGAGATGAAGGCCAAAGAGGGC | 41 |
| deficiency | GTGGTGTATGTGGAGGTGCGGTACAGTCCGCACCTGCTGGC | |
| ARG101TRP | CAACTCCAAAGTGGAGCCAATCCCCTGGAACCAGGCTG | |
| CGG to TGG | CAGCCTGGTTCCAGGGGATTGGCTCCACTTTGGAGTTGGCCA | 42 |
| | GCAGGTGCGGACTGTACCGCACCTCCACATACACCACGCCCT | |
| | CTTTGGCCTTCATCTCTACAAACTCATAGGCGATCCT | |
| | TGGAGGTGCGGTACAGT | 43 |
| | ACTGTACCGCACCTCCA | 44 |
| Adenosine deaminase | ATGAGTTTGTAGAGATGAAGGCCAAAGAGGGCGTGGTGTATG | 45 |
| deficiency | TGGAGGTGCGGTACAGTCCGCACCTGCTGGCCAACTCCAAA | |
| PRO104LEU | GTGGAGCCAATCCCCTGGAACCAGGCTGAGTGAGTGAT | |
| CCG to CTG | ATCACTCACTCAGCCTGGTTCCAGGGGATTGGCTCCACTTTG | 46 |
| | GAGTTGGCCAGCAGGTGCGGACTGTACCGCACCTCCACATA | |
| | CACCACGCCCTCTTTGGCCTTCATCTCTACAAACTCAT | |
| | GTACAGTCCGCACCTGC | 47 |
| | GCAGGTGCGGACTGTAC | 48 |
| Adenosine deaminase | TTTGTAGAGATGAAGGCCAAAGAGGGCGTGGTGTATGTGGAG | 49 |
| deficiency | GTGCGGTACAGTCCGCACCTGCTGGCCAACTCCAAAGTGGA | |
| LEU106VAL | GCCAATCCCCTGGAACCAGGCTGAGTGAGTGATGGGCC | |
| CTG to GTG | GGCCCATCACTCACTCAGCCTGGTTCCAGGGGATTGGCTCCA | 50 |
| | CTTTGGAGTTGGCCAGCAGGTGCGGACTGTACCGCACCTCCA | |
| | CATACACCACGCCCTCTTTGGCCTTCATCTCTACAAA | |
| | GTCCGCACCTGCTGGCC | 51 |
| | GGCCAGCAGGTGCGGAC | 52 |
| Adenosine deaminase | TAGAGATGAAGGCCAAAGAGGGCGTGGTGTATGTGGAGGTG | 53 |
| deficiency | CGGTACAGTCCGCACCTGCTGGCCAACTCCAAAGTGGAGCC | |
| LEU107PRO | AATCCCCTGGAACCAGGCTGAGTGAGTGATGGGCCTGGA | |
| CTG to CCG | TCCAGGCCCATCACTCACTCAGCCTGGTTCCAGGGGATTGGC | 54 |
| | TCCACTTTGGAGTTGGCCAGCAGGTGCGGACTGTACCGCAC | |
| | CTCCACATACACCACGCCCTCTTTGGCCTTCATCTCTA | |
| | GCACCTGCTGGCCAACT | 55 |
| | AGTTGGCCAGCAGGTGC | 56 |
| Adenosine deaminase | GCCTTCCTTTTGCCTCAGGCCCATCCCTACTCCTCTCCTCACA | 57 |
| deficiency | CAGAGGGGACCTCACCCCAGACGAGGTGGTGGCCCTAGTGG | |
| PRO126GLN | GCCAGGGCCTGCAGGAGGGGGAGCGAGACTTCGGGGT | |
| CCA to CAA | ACCCCGAAGTCTCGCTCCCCCTCCTGCAGGCCCTGGCCCAC | 58 |
| | TAGGGCCACCACCTCGTCTGGGGTGAGGTCCCCTCTGTGTG | |
| | AGGAGAGGAGTAGGGATGGGCCTGAGGCAAAAGGAAGGC | |
| | CCTCACCCCAGACGAGG | 59 |
| | CCTCGTCTGGGGTGAGG | 60 |
| Adenosine deaminase | TTTGCCTCAGGCCCATCCCTACTCCTCTCCTCACACAGAGGG | 61 |
| deficiency | GACCTCACCCCAGACGAGGTGGTGGCCCTAGTGGGCCAGGG | |
| VAL129MET | CCTGCAGGAGGGGGAGCGAGACTTCGGGGTCAAGGCCC | |
| GTG to ATG | GGGCCTTGACCCCGAAGTCTCGCTCCCCCTCCTGCAGGCCC | 62 |
| | TGGCCCACTAGGGCCACCACCTCGTCTGGGGTGAGGTCCCC | |
| | TCTGTGTGAGGAGAGGAGTAGGGATGGGCCTGAGGCAAA | |
| | CAGACGAGGTGGTGGCC | 63 |
| | GGCCACCACCTCGTCTG | 64 |
| Adenosine deaminase | ACAGAGGGGACCTCACCCCAGACGAGGTGGTGGCCCTAGTG | 65 |
| deficiency | GGCCAGGGCCTGCAGGAGGGGGAGCGAGACTTCGGGGTCA | |
| GLY140GLU | AGGCCCGGTCCATCCTGTGCTGCATGCGCCACCAGCCCAG | |
| GGG to GAG | CTGGGCTGGTGGCGCATGCAGCACAGGATGGACCGGGCCTT | 66 |
| | GACCCCGAAGTCTCGCTCCCCCTCCTGCAGGCCCTGGCCCA | |
| | CTAGGGCCACCACCTCGTCTGGGGTGAGGTCCCCTCTGT | |
| | GCAGGAGGGGGAGCGAG | 67 |
| | CTCGCTCCCCCTCCTGC | 68 |
| Adenosine deaminase | GGGACCTCACCCCAGACGAGGTGGTGGCCCTAGTGGGCCAG | 69 |
| deficiency | GGCCTGCAGGAGGGGGAGCGAGACTTCGGGGTCAAGGCCC | |
| ARG142GLN | GGTCCATCCTGTGCTGCATGCGCCACCAGCCCAGTGAGTA | |
| CGA to CAA | TACTCACTGGGCTGGTGGCGCATGCAGCACAGGATGGACCG | 70 |
| | GGCCTTGACCCCGAAGTCTCGCTCCCCCTCCTGCAGGCCCT | |
| | GGCCCACTAGGGCCACCACCTCGTCTGGGGTGAGGTCCC | |
| | GGGGGAGCGAGACTTCG | 71 |
| | CGAAGTCTCGCTCCCCC | 72 |
| Adenosine deaminase | GGGGACCTCACCCCAGACGAGGTGGTGGCCCTAGTGGGCCA | 73 |
| deficiency | GGGCCTGCAGGAGGGGGAGCGAGACTTCGGGGTCAAGGCC | |
| ARG142TERM | CGGTCCATCCTGTGCTGCATGCGCCACCAGCCCAGTGAGT | |
| CGA to TGA | ACTCACTGGGCTGGTGGCGCATGCAGCACAGGATGGACCGG | 74 |
| | GCCTTGACCCCGAAGTCTCGCTCCCCCTCCTGCAGGCCCTG | |
| | GCCCACTAGGGCCACCACCTCGTCTGGGGTGAGGTCCCC | |
| | AGGGGGAGCGAGACTTC | 75 |
| | GAAGTCTCGCTCCCCCT | 76 |
| Adenosine deaminase | TGGTGGCCCTAGTGGGCCAGGGCCTGCAGGAGGGGGAGCG | 77 |
| deficiency | AGACTTCGGGGTCAAGGCCCGGTCCATCCTGTGCTGCATGC | |
| ARG149GLN | GCCACCAGCCCAGTGAGTAGGATCACCGCCCTGCCCAGGG | |
| CGG to CAG | CCCTGGGCAGGGCGGTGATCCTACTCACTGGGCTGGTGGCG | 78 |
| | CATGCAGCACAGGATGGACCGGGCCTTGACCCCGAAGTCTC | |
| | GCTCCCCCTCCTGCAGGCCCTGGCCCACTAGGGCCACCA | |
| | CAAGGCCCGGTCCATCC | 79 |
| | GGATGGACCGGGCCTTG | 80 |
| Adenosine deaminase | GTGGTGGCCCTAGTGGGCCAGGGCCTGCAGGAGGGGGAGC | 81 |
| deficiency | GAGACTTCGGGGTCAAGGCCCGGTCCATCCTGTGCTGCATG | |
| ARG149TRP | CGCCACCAGCCCAGTGAGTAGGATCACCGCCCTGCCCAGG | |
| CGG to TGG | CCTGGGCAGGGCGGTGATCCTACTCACTGGGCTGGTGGCGC | 82 |
| | ATGCAGCACAGGATGGACCGGGCCTTGACCCCGAAGTCTCG | |
| | CTCCCCCTCCTGCAGGCCCTGGCCCACTAGGGCCACCAC | |
| | TCAAGGCCCGGTCCATC | 83 |
| | GATGGACCGGGCCTTGA | 84 |
| Adenosine deaminase | CTAGTGGGCCAGGGCCTGCAGGAGGGGGAGCGAGACTTCG | 85 |
| deficiency | GGGTCAAGGCCCGGTCCATCCTGTGCTGCATGCGCCACCAG | |
| LEU152MET | CCCAGTGAGTAGGATCACCGCCCTGCCCAGGGCCGCCCGT | |
| CTG to ATG | ACGGGCGGCCCTGGGCAGGGCGGTGATCCTACTCACTGGGC | 86 |
| | TGGTGGCGCATGCAGCACAGGATGGACCGGGCCTTGACCCC | |
| | GAAGTCTCGCTCCCCCTCCTGCAGGCCCTGGCCCACTAG | |
| | GGTCCATCCTGTGCTGC | 87 |
| | GCAGCACAGGATGGACC | 88 |
| Adenosine deaminase | GGCCTGCAGGAGGGGGAGCGAGACTTCGGGGTCAAGGCCC | 89 |
| deficiency | GGTCCATCCTGTGCTGCATGCGCCACCAGCCCAGTGAGTAG | |
| ARG156CYS | GATCACCGCCCTGCCCAGGGCCGCCCGTCTCACCCTGGCC | |
| CGC to TGC | GGCCAGGGTGAGACGGGCGGCCCTGGGCAGGGCGGTGATC | 90 |
| | CTACTCACTGGGCTGGTGGCGCATGCAGCACAGGATGGACC | |
| | GGGCCTTGACCCCGAAGTCTCGCTCCCCCTCCTGCAGGCC | |
| | GCTGCATGCGCCACCAG | 91 |
| | CTGGTGGCGCATGCAGC | 92 |
| Adenosine deaminase | GCCTGCAGGAGGGGGAGCGAGACTTCGGGGTCAAGGCCCG | 93 |
| deficiency | GTCCATCCTGTGCTGCATGCGCCACCAGCCCAGTGAGTAGGA | |
| ARG156HIS | TCACCGCCCTGCCCAGGGCCGCCCGTCTCACCCTGGCCC | |
| CGC to CAC | GGGCCAGGGTGAGACGGGCGGCCCTGGGCAGGGCGGTGAT | 94 |
| | CCTACTCACTGGGCTGGTGGCGCATGCAGCACAGGATGGAC | |
| | CGGGCCTTGACCCCGAAGTCTCGCTCCCCCTCCTGCAGGC | |
| | CTGCATGCGCCACCAGC | 95 |
| | GCTGGTGGCGCATGCAG | 96 |
| Adenosine deaminase | CTGCCCACAGACTGGTCCCCCAAGGTGGTGGAGCTGTGTAA | 97 |
| deficiency | GAAGTACCAGCAGCAGACCGTGGTAGCCATTGACCTGGCTG | |
| VAL177MET | GAGATGAGACCATCCCAGGAAGCAGCCTCTTGCCTGGAC | |
| GTG to ATG | GTCCAGGCAAGAGGCTGCTTCCTGGGATGGTCTCATCTCCAG | 98 |
| | CCAGGTCAATGGCTACCACGGTCTGCTGCTGGTACTTCTTAC | |
| | ACAGCTCCACCACCTTGGGGGACCAGTCTGTGGGCAG | |
| | AGCAGACCGTGGTAGCC | 99 |
| | GGCTACCACGGTCTGCT | 100 |
| Adenosine deaminase | CAGACTGGTCCCCCAAGGTGGTGGAGCTGTGTAAGAAGTACC | 101 |
| deficiency | AGCAGCAGACCGTGGTAGCCATTGACCTGGCTGGAGATGAG | |
| ALA179ASP | ACCATCCCAGGAAGCAGCCTCTTGCCTGGACATGTCCA | |
| GCC to GAC | TGGACATGTCCAGGCAAGAGGCTGCTTCCTGGGATGGTCTCA | 102 |
| | TCTCCAGCCAGGTCAATGGCTACCACGGTCTGCTGCTGGTAC | |
| | TTCTTACACAGCTCCACCACCTTGGGGGACCAGTCTG | |
| | CGTGGTAGCCATTGACC | 103 |
| | GGTCAATGGCTACCACG | 104 |
| Adenosine deaminase | CCATTGACCTGGCTGGAGATGAGACCATCCCAGGAAGCAGC | 105 |
| deficiency | CTCTTGCCTGGACATGTCCAGGCCTACCAGGTGGGTCCTGTG | |
| GLN199PRO | AGAAGGAATGGAGAGGCTGGCCCTGGGTGAGCTTGTCT | |
| CAG to CCG | AGACAAGCTCACCCAGGGCCAGCCTCTCCATTCCTTCTCACA | 106 |
| | GGACCCACCTGGTAGGCCTGGACATGTCCAGGCAAGAGGCT | |
| | GCTTCCTGGGATGGTCTCATCTCCAGCCAGGTCAATGG | |
| | ACATGTCCAGGCCTACC | 107 |
| | GGTAGGCCTGGACATGT | 108 |
| Adenosine deaminase | GCTAGGGCACCCATGACCTGGCTCTCCCCCTTCCAGGAGGC | 109 |
| deficiency | TGTGAAGAGCGGCATTCACCGTACTGTCCACGCCGGGGAGG | |
| ARG211CYS | TGGGCTCGGCCGAAGTAGTAAAAGAGGTGAGGGCCTGGG | |
| CGT to TGT | CCCAGGCCCTCACCTCTTTTACTACTTCGGCCGAGCCCACCT | 110 |
| | CCCCGGCGTGGACAGTACGGTGAATGCCGCTCTTCACAGCC | |
| | TCCTGGAAGGGGGAGAGCCAGGTCATGGGTGCCCTAGC | |
| | GCATTCACCGTACTGTC | 111 |
| | GACAGTACGGTGAATGC | 112 |
| Adenosine deaminase | CTAGGGCACCCATGACCTGGCTCTCCCCCTTCCAGGAGGCT | 113 |
| deficiency | GTGAAGAGCGGCATTCACCGTACTGTCCACGCCGGGGAGGT | |
| ARG211HIS | GGGCTCGGCCGAAGTAGTAAAAGAGGTGAGGGCCTGGGC | |
| CGT to CAT | GCCCAGGCCCTCACCTCTTTTACTACTTCGGCCGAGCCCACC | 114 |
| | TCCCCGGCGTGGACAGTACGGTGAATGCCGCTCTTCACAGC | |
| | CTCCTGGAAGGGGGAGAGCCAGGTCATGGGTGCCCTAG | |
| | CATTCACCGTACTGTCC | 115 |
| | GGACAGTACGGTGAATG | 116 |
| Adenosine deaminase | ATGACCTGGCTCTCCCCCTTCCAGGAGGCTGTGAAGAGCGG | 117 |
| deficiency | CATTCACCGTACTGTCCACGCCGGGGAGGTGGGCTCGGCCG | |
| ALA215THR | AAGTAGTAAAAGAGGTGAGGGCCTGGGCTGGCCATGGGG | |
| GCC to ACC | CCCCATGGCCAGCCCAGGCCCTCACCTCTTTTACTACTTCGG | 118 |
| | CCGAGCCCACCTCCCCGGCGTGGACAGTACGGTGAATGCCG | |
| | CTCTTCACAGCCTCCTGGAAGGGGGAGAGCCAGGTCAT | |
| | CTGTCCACGCCGGGGAG | 119 |
| | CTCCCCGGCGTGGACAG | 120 |
| Adenosine deaminase | ACCTGGCTCTCCCCCTTCCAGGAGGCTGTGAAGAGCGGCATT | 121 |
| deficiency | CACCGTACTGTCCACGCCGGGGAGGTGGGCTCGGCCGAAGT | |
| GLY216ARG | AGTAAAAGAGGTGAGGGCCTGGGCTGGCCATGGGGTCC | |
| GGG to AGG | GGACCCCATGGCCAGCCCAGGCCCTCACCTCTTTTACTACTT | 122 |
| | CGGCCGAGCCCACCTCCCCGGCGTGGACAGTACGGTGAATG | |
| | CCGCTCTTCACAGCCTCCTGGAAGGGGGAGAGCCAGGT | |
| | TCCACGCCGGGGAGGTG | 123 |
| | CACCTCCCCGGCGTGGA | 124 |
| Adenosine deaminase | TGGCTCTCCCCCTTCCAGGAGGCTGTGAAGAGCGGCATTCAC | 125 |
| deficiency | CGTACTGTCCACGCCGGGGAGGTGGGCTCGGCCGAAGTAGT | |
| GLU217LYS | AAAAGAGGTGAGGGCCTGGGCTGGCCATGGGGTCCCTC | |
| GAG to AAG | GAGGGACCCCATGGCCAGCCCAGGCCCTCACCTCTTTTACTA | 126 |
| | CTTCGGCCGAGCCCACCTCCCCGGCGTGGACAGTACGGTGA | |
| | ATGCCGCTCTTCACAGCCTCCTGGAAGGGGGAGAGCCA | |
| | ACGCCGGGGAGGTGGGC | 127 |
| | GCCCACCTCCCCGGCGT | 128 |
| Adenosine deaminase | CTGCCTCCTCCCATACTTGGCTCTATTCTGCTTCTCTACAGGC | 129 |
| deficiency | TGTGGACATACTCAAGACAGAGCGGCTGGGACACGGCTACC | |
| THR233ILE | ACACCCTGGAAGACCAGGCCCTTTATAACAGGCTGCG | |
| ACA to ATA | CGCAGCCTGTTATAAAGGGCCTGGTCTTCCAGGGTGTGGTAG | 130 |
| | CCGTGTCCCAGCCGCTCTGTCTTGAGTATGTCCACAGCCTGT | |
| | AGAGAAGCAGAATAGAGCCAAGTATGGGAGGAGGCAG | |
| | ACTCAAGACAGAGCGGC | 131 |
| | GCCGCTCTGTCTTGAGT | 132 |
| Adenosine deaminase | CAGAGCGGCTGGGACACGGCTACCACACCCTGGAAGACCAG | 133 |
| deficiency | GCCCTTTATAACAGGCTGCGGCAGGAAAACATGCACTTCGAG | |
| ARG253PRO | GTAAGCGGGCCAGGGAGTGGGGAGGAACCATCCCCGGC | |
| CGG to CCG | GCCGGGGATGGTTCCTCCCCACTCCCTGGCCCGCTTACCTC | 134 |
| | GAAGTGCATGTTTTCCTGCCGCAGCCTGTTATAAAGGGCCTG | |
| | GTCTTCCAGGGTGTGGTAGCCGTGTCCCAGCCGCTCTG | |
| | CAGGCTGCGGCAGGAAA | 135 |
| | TTTCCTGCCGCAGCCTG | 136 |
| Adenosine deaminase | GAGCGGCTGGGACACGGCTACCACACCCTGGAAGACCAGGC | 137 |
| deficiency | CCTTTATAACAGGCTGCGGCAGGAAAACATGCACTTCGAGGT | |
| GLN254TERM | AAGCGGGCCAGGGAGTGGGGAGGAACCATCCCCGGCTG | |
| CAG to TAG | CAGCCGGGGATGGTTCCTCCCCACTCCCTGGCCCGCTTACC | 138 |
| | CGAAGTGCATGTTTTCCTGCCGCAGCCTGTTATAAAGGGCCT | |
| | GGTCTTCCAGGGTGTGGTAGCCGTGTCCCAGCCGCTC | |
| | GGCTGCGGCAGGAAAAC | 139 |
| | GTTTTCCTGCCGCAGCC | 140 |
| Adenosine deaminase | CCACACACCTGCTCTTCCAGATCTGCCCCTGGTCCAGCTACC | 141 |
| deficiency | TCACTGGTGCCTGGAAGCCGGACACGGAGCATGCAGTCATTC | |
| PRO274LEU | GGTGAGCTCTGTTCCCCTGGGCCTGTTCAATTTTGTT | |
| CCG to CTG | AACAAAATTGAACAGGCCCAGGGGAACAGAGCTCACCGAATG | 142 |
| | ACTGCATGCTCCGTGTCCGGCTTCCAGGCACCAGTGAGGTAG | |
| | CTGGACCAGGGGCAGATCTGGAAGAGCAGGTGTGTGG | |
| | CTGGAAGCCGGACACGG | 143 |
| | CCGTGTCCGGCTTCCAG | 144 |
| Adenosine deaminase | GGAGGCTGATTCTCTCCTCCTCCCTCTTCTGCAGGCTCAAAA | 145 |
| deficiency | ATGACCAGGCTAACTACTCGCTCAACACAGATGACCCGCTCA | |
| SER291LEU | TCTTCAAGTCCACCCTGGACACTGATTACCAGATGAC | |
| TCG to TTG | GTCATCTGGTAATCAGTGTCCAGGGTGGACTTGAAGATGAGC | 146 |
| | GGGTCATCTGTGTTGAGCGAGTAGTTAGCCTGGTCATTTTTGA | |
| | GCCTGCAGAAGAGGGAGGAGGAGAGAATCAGCCTCC | |
| | TAACTACTCGCTCAACA | 147 |
| | TGTTGAGCGAGTAGTTA | 148 |
| Adenosine deaminase | CCTCCCTCTTCTGCAGGCTCAAAAATGACCAGGCTAACTACTC | 149 |
| deficiency | GCTCAACACAGATGACCCGCTCATCTTCAAGTCCACCCTGGA | |
| PRO297GLN | CACTGATTACCAGATGACCAAACGGGACATGGGCTT | |
| CCG to CAG | AAGCCCATGTCCCGTTTGGTCATCTGGTAATCAGTGTCCAGG | 150 |
| | GTGGACTTGAAGATGAGCGGGTCATCTGTGTTGAGCGAGTAG | |
| | TTAGCCTGGTCATTTTTGAGCCTGCAGAAGAGGGAGG | |
| | AGATGACCCGCTCATCT | 151 |
| | AGATGAGCGGGTCATCT | 152 |
| Adenosine deaminase | AAAATGACCAGGCTAACTACTCGCTCAACACAGATGACCCGC | 153 |
| deficiency | TCATCTTCAAGTCCACCCTGGACACTGATTACCAGATGACCAA | |
| LEU304ARG | ACGGGACATGGGCTTTACTGAAGAGGAGTTTAAAAG | |
| CTG to CGG | CTTTTAAACTCCTCTTCAGTAAAGCCCATGTCCCGTTTGGTCA | 154 |
| | TCTGGTAATCAGTGTCCAGGGTGGACTTGAAGATGAGCGGGT | |
| | CATCTGTGTTGAGCGAGTAGTTAGCCTGGTCATTTT | |
| | GTCCACCCTGGACACTG | 155 |
| | CAGTGTCCAGGGTGGAC | 156 |
| Adenosine deaminase | GCCTTCTTTGTTCTCTGGTTCCATGTTGTCTGCCATTCTGGCC | 157 |
| deficiency | TTTCCAGAACATCAATGCGGCCAAATCTAGTTTCCTCCCAGAA | |
| ALA329VAL | GATGAAAAGAGGGAGCTTCTCGACCTGCTCTATAA | |
| C-to-T at base 1081 | TTATAGAGCAGGTCGAGAAGCTCCCTCTTTTCATCTTCTGGGA | 158 |
| | GGAAACTAGATTTGGCCGCATTGATGTTCTGGAAAGGCCAGA | |
| | ATGGCAGACAACATGGAACCAGAGAACAAAGAAGGC | |
| | CATCAATGCGGCCAAAT | 159 |
| | ATTTGGCCGCATTGATG | 160 |

### EXAMPLE 6

### P53 Mutations

[0205] The p53 gene codes for a protein that acts as a transcription factor and serves as a key regulator of the cell cycle. Mutation in this gene is probably the most significant genetic change characterizing the transformation of cells from normalcy to malignancy.

[0206] Inactivation of p53 by mutation disrupts the cell cycle which, in turn, sets the stage for tumor formation. Mutations in the p53 gene are among the most commonly diagnosed genetic disorders, occurring in as many as 50% of cancer patients. For some types of cancer, most notably of the breast, lung and colon, p53 mutations are the predominant genetic alternations found thus far. These mutations are associated with genomic instability and thus an increased susceptibility to cancer. Some p53 lesions result in malignancies that are resistant to the most widely used therapeutic regimens and therefore demand more aggressive treatment.

[0207] That p53 is associated with different malignant tumors is illustrated in the Li-Fraumeni autosomal dominant hereditary disorder characterized by familial multiple tumors due to mutation in the p53 gene. Affected individuals can develop one or more tumors, including: brain (12%); soft-tissue sarcoma (12%); breast cancer (25%); adrenal tumors (1%); bone cancer (osteosarcoma) (6%); cancer of the lung, prostate, pancreas, and colon as well as lymphoma and melanoma can also occur.

[0208] Certain of the most frequently mutated codons are codons 175, 248 and 273, however a variety of oligonucleotides are described below in the attached table.

TABLE 7
p53 Mutations and Genome-Correcting Oligos

| | | |
|---|---|---|
| Clinical Phenotype & | | SEQ ID |
| Mutation | Correcting Oligos | NO: |

| | | |
|---|---|---|
| In 2 families with | GACTGTACCACCATCCACTACAACTACATGTGTAACAGTTCCT | 161 |
| Li-Fraumeni | GCATGGGCGGCATGAACCGGAGGCCCATCCTCACCATCATC | |
| syndrome, there was a | ACACTGGAAGACTCCAGGTCAGGAGCCACTTGCCACC | |
| C-to-T mutation at the | GGTGGCAAGTGGCTCCTGACCTGGAGTCTTCCAGTGTGATGA | 162 |
| first nucleotide of | TGGTGAGGATGGGCCTCCGGTTCATGCCGCCCATGCAGGAA | |
| codon 248 which | CTGTTACACATGTAGTTGTAGTGGATGGTGGTACAGTC | |
| changed arginine to | GCATGAACCGGAGGCCC | 163 |
| tryptophan. | GGGCCTCCGGTTCATGC | 164 |
| In a family with the | TGTAACAGTTCCTGCATGGGCGGCATGAACCGGAGGCCCAT | 165 |
| Li-Fraumeni | CCTCACCATCATCACACTGGAAGACTCCAGGTCAGGAGCCAC | |
| syndrome, a G-to-A | TTGCCACCCTGCACACTGGCCTGCTGTGCCCCAGCCTC | |
| mutation at the first | GAGGCTGGGGCACAGCAGGCCAGTGTGCAGGGTGGCAAGT | 166 |
| nucleotide of codon | GGCTCCTGACCTGGAGTCTTCCAGTGTGATGATGGTGAGGAT | |
| 258 resulting in the | GGGCCTCCGGTTCATGCCGCCCATGCAGGAACTGTTACA | |
| substitution of lysine | TCACACTGGAAGACTCC | 167 |
| for glutamic acid. | GGAGTCTTCCAGTGTGA | 168 |
| In a family with the | GTTGGCTCTGACTGTACCACCATCCACTACAACTACATGTGTA | 169 |
| Li-Fraumeni | ACAGTTCCTGCATGGGCGGCATGAACCGGAGGCCCATCCTC | |
| syndrome, a G-to-T | ACCATCATCACACTGGAAGACTCCAGGTCAGGAGCCA | |
| mutation at | | |
| the first nucleotide of | | |
| codon 245 resulting in | | |
| the substitution of | | |
| cysteine for glycine. | | |
| A gly245-to-ser, | TGGCTCCTGACCTGGAGTCTTCCAGTGTGATGATGGTGAGGA | 170 |
| GGC-to-AGC, | TGGGCCTCCGGTTCATGCCGCCCATGCAGGAACTGTTACACA | |
| mutation was found in | TGTAGTTGTAGTGGATGGTGGTACAGTCAGAGCCAAC | |
| a patient in whom | GCATGGGCGGCATGAAC | 171 |
| osteosarcoma was | GTTCATGCCGCCCATGC | 172 |
| diagnosed at the age | | |
| of 18 years. | | |
| In a family with the | TCCACTACAACTACATGTGTAACAGTTCCTGCATGGGCGGCA | 173 |
| Li-Fraumeni | TGAACCGGAGGCCCATCCTCACCATCATCACACTGGAAGACT | |
| syndrome, a germline | CCAGGTCAGGAGCCACTTGCCACCCTGCACACTGGCC | |
| mutation at codon 252: | GGCCAGTGTGCAGGGTGGCAAGTGGCTCCTGACCTGGAGTC | 174 |
| a T-to-C change at the | TTCCAGTGTGATGATGGTGAGGATGGGCCTCCGGTTCATGCC | |
| second position | GCCCATGCAGGAACTGTTACACATGTAGTTGTAGTGGA | |
| resulted in substitution | GCCCATCCTCACCATCA | 175 |
| of proline for leucine. | TGATGGTGAGGATGGGC | 176 |
| Researchers analyzed | TACCACCATCCACTACAACTACATGTGTAACAGTTCCTGCATG | 177 |
| for mutations in p53 | GGCGGCATGAACCGGAGGCCCATCCTCACCATCATCACACT | |
| hepatocellular | GGAAGACTCCAGGTCAGGAGCCACTTGCCACCCTGCA | |
| hepatocellular | TGCAGGGTGGCAAGTGGCTCCTGACCTGGAGTCTTCCAGTGT | 178 |
| carcinomas from | GATGATGGTGAGGATGGGCCTCCGGTTCATGCCGCCCATGC | |
| patients in Qidong, an | AGGAACTGTTACACATGTAGTTGTAGTGGATGGTGGTA | |
| area of high incidence | AACCGGAGGCCCATCCT | 179 |
| in China, in which both | AGGATGGGCCTCCGGTT | 180 |
| hepatitis B virus and | | |
| aflatoxin B1 are risk | | |
| factors. Eight of 16 | | |
| tumors had a point | | |
| mutation at the third | | |
| base position of codon | | |
| 249. The G-to-T | | |
| mutation at codon 249 | | |
| led to a change from | | |
| arginine to serine | | |
| (AGG to AGT). | | |
| In cases of | CTGGCCAAGACCTGCCCTGTGCAGCTGTGGGTTGATTCCACA | 181 |
| hepatocellular | CCCCCGCCCGGCACCCGCGTCCGCGCCATGGCCATCTACAA | |
| carcinoma in southern | GCAGTCACAGCACATGACGGAGGTTGTGAGGCGCTGCC | |
| Africa, a G-to-T | GGCAGCGCCTCACAACCTCCGTCATGTGCTGTGACTGCTTGT | 182 |
| substitution in codon | AGATGGCCATGGCGCGGACGCGGGTGCCGGGCGGGGGTGT | |
| 157 resulting in a | GGAATCAACCCACAGCTGCACAGGGCAGGTCTTGGCCAG | |
| change from valine to | GCACCCGCGTCCGCGCC | 183 |
| phenylalanine. | GGCGCGGACGCGGGTGC | 184 |
| In a family with | TTGGCTCTGACTGTACCACCATCCACTACAACTACATGTGTAA | 185 |
| Li-Fraumeni in which | CAGTTCCTGCATGGGCGGCATGAACCGGAGGCCCATCCTCA | |
| noncancerous skin | CCATCATCACACTGGAAGACTCCAGGTCAGGAGCCAC | |
| fibroblasts from | GTGGCTCCTGACCTGGAGTCTTCCAGTGTGATGATGGTGAGG | 186 |
| affected individuals | ATGGGCCTCCGGTTCATGCCGCCCATGCAGGAACTGTTACAC | |
| showed an unusual | ATGTAGTTGTAGTGGATGGTGGTACAGTCAGAGCCAA | |
| radiation-resistant | CATGGGCGGCATGAACC | 187 |
| phenotype, a point | GGTTCATGCCGCCCATG | 188 |
| mutation in codon 245 | | |
| of the P53 gene. A | | |
| change from GGC to | | |
| GAC predicted | | |
| substitution of aspartic | | |
| acid for glycine. | | |
| In 2 of 8 families with | ACTGTACCACCATCCACTACAACTACATGTGTAACAGTTCCTG | 189 |
| Li-Fraumeni | CATGGGCGGCATGAACCGGAGGCCCATCCTCACCATCATCA | |
| syndrome, a mutation | CACTGGAAGACTCCAGGTCAGGAGCCACTTGCCACCC | |
| syndrome, a mutation | GGGTGGCAAGTGGCTCCTGACCTGGAGTCTTCCAGTGTGAT | 190 |
| in codon 248: a | GATGGTGAGGATGGGCCTCCGGTTCATGCCGCCCATGCAGG | |
| CGG-to-CAG change | AACTGTTACACATGTAGTTGTAGTGGATGGTGGTACAGT | |
| resulting in substitution | CATGAACCGGAGGCCCA | 191 |
| of glutamine for | TGGGCCTCCGGTTCATG | 192 |
| arginine. | | |
| In 9 members of an | CCCTGACTTTCAACTCTGTCTCCTTCCTCTTCCTACAGTACTC | 193 |
| extended family with | CCCTGCCCTCAACAAGATGTTTTGCCAACTGGCCAAGACCTG | |
| Li-Fraumeni | CCCTGTGCAGCTGTGGGTTGATTCCACACCCCCGCC | |
| syndrome, a germline | GGCGGGGGTGTGGAATCAACCCACAGCTGCACAGGGCAGGT | 194 |
| mutation at codon 133 | CTTGGCCAGTTGGCAAAACATCTTGTTGAGGGCAGGGGAGTA | |
| (ATG-to-ACG), | CTGTAGGAAGAGGAAGGAGACAGAGTTGAAAGTCAGGG | |
| resulted in the | CAACAAGATGTTTTGCC | 195 |
| substitution of | GGCAAAACATCTTGTTG | 196 |
| threonine for | | |
| methionine (M133T), | | |
| and completely | | |
| cosegregated with the | | |
| cancer syndrome. | | |
| In 1 pedigree | TCTTGCTTCTCTTTTCCTATCCTGAGTAGTGGTAATCTACTGG | 197 |
| consistent with the | GACGGAACAGCTTTGAGGTGCGTGTTTGTGCCTGTCCTGGGA | |
| Li-Fraumeni | GAGACCGGCGCACAGAGGAAGAGAATCTCCGCAAGA | |
| syndrome, a germline | TCTTGCGGAGATTCTCTTCCTCTGTGCGCCGGTCTCTCCCAG | 198 |
| G-to-T transversion at | GACAGGCACAAACACGCACCTCAAAGCTGTTCCGTCCCAGTA | |
| codon 272 (valine to | GATTACCACTACTCAGGATAGGAAAAGAGAAGCAAGA | |
| leucine) was found. | GCTTTGAGGTGCGTGTT | 199 |
| | AACACGCACCTCAAAGC | 200 |
| A ser241-to-phe | TTATCTCCTAGGTTGGCTCTGACTGTACCACCATCCACTACAA | 201 |
| mutation due to a | CTACATGTGTAACAGTTCCTGCATGGGCGGCATGAACCGGAG | |
| TCC-to-TTC change | GCCCATCCTCACCATCATCACACTGGAAGACTCCAG | |
| was found in a patient | CTGGAGTCTTCCAGTGTGATGATGGTGAGGATGGGCCTCCG | 202 |
| with hepatoblastoma | GTTCATGCCGCCCATGCAGGAACTGTTACACATGTAGTTGTA | |
| and multiple foci of | GTGGATGGTGGTACAGTCAGAGCCAACCTAGGAGATAA | |
| osteosarcoma. | TAACAGTTCCTGCATGG | 203 |
| | CCATGCAGGAACTGTTA | 204 |
| An AAG-to-TAG | CAGAAAACCTACCAGGGCAGCTACGGTTTCCGTCTGGGCTTC | 205 |
| change of codon 120, | TTGCATTCTGGGACAGCCAAGTCTGTGACTTGCACGGTCAGT | |
| resulting in conversion | TGCCCTGAGGGGCTGGCTTCCATGAGACTTCAATGCC | |
| resulting in conversion | GGCATTGAAGTCTCATGGAAGCCAGCCCCTCAGGGCAACTGA | 206 |
| from lysine to a stop | CCGTGCAAGTCACAGACTTGGCTGTCCCAGAATGCAAGAAGC | |
| codon, was found in a | CCAGACGGAAACCGTAGCTGCCCTGGTAGGTTTTCTG | |
| patient with | GGACAGCCAAGTCTGTG | 207 |
| osteosarcoma and | CACAGACTTGGCTGTCC | 208 |
| adenocarcinoma of the | | |
| lung at age 18 and | | |
| brain tumor (glioma) at | | |
| the age of 27. | | |
| A CGG-to-TGG | GGTAATCTACTGGGACGGAACAGCTTTGAGGTGCGTGTTTGT | 209 |
| change at codon 282, | GCCTGTCCTGGGAGAGACCGGCGCACAGAGGAAGAGAATCT | |
| resulting in the | CCGCAAGAAAGGGGAGCCTCACCACGAGCTGCCCCCAG | |
| substitution of | CTGGGGGCAGCTCGTGGTGAGGCTCCCCTTTCTTGCGGAGA | 210 |
| tryptophan for arg | TTCTCTTCCTCTGTGCGCCGGTCTCTCCCAGGACAGGCACAA | |
| nine, was found in a | ACACGCACCTCAAAGCTGTTCCGTCCCAGTAGATTACC | |
| patient who developed | GGAGAGACCGGCGCACA | 211 |
| osteosarcoma at the | TGTGCGCCGGTCTCTCC | 212 |
| age of 10 years. | | |
| In 5 of 6 anaplastic | GCTTCTCTTTTCCTATCCTGAGTAGTGGTAATCTACTGGGACG | 213 |
| carcinomas of the | GAACAGCTTTGAGGTGCGTGTTTGTGCCTGTCCTGGGAGAGA | |
| thyroid and in an | CCGGCGCACAGAGGAAGAGAATCTCCGCAAGAAAGG | |
| anaplastic carcinoma | CCTTTCTTGCGGAGATTCTCTTCCTCTGTGCGCCGGTCTCTC | 214 |
| thyroid cell line ARO, a | CCAGGACAGGCACAAACACGCACCTCAAAGCTGTTCCGTCCC | |
| CGT-to-CAT mutation | AGTAGATTACCACTACTCAGGATAGGAAAAGAGAAGC | |
| converted | TGAGGTGCGTGTTTGTG | 215 |
| arginine-273 to | CACAAACACGCACCTCA | 216 |
| histidine. | | |
| A germline | TCCTAGCACTGCCCAACAACACCAGCTCCTCTCCCCAGCCAA | 217 |
| GGA-to-GTA mutation | AGAAGAAACCACTGGATGGl AGAATATTTCACCCTTCAGGTACT | |
| resulting in a change | AAGTCTTGGGACCTCTTATCAAGTGGAAAGTTTCCA | |
| of | TGGAAACTTTCCACTTGATAAGAGGTCCCAAGACTTAGTACCT | 218 |
| glycine-325 to valine | GAAGGGTGAAATATTCTCCATCCAGTGGTTTCTTCTTTGGCTG | |
| was found in a patient | GGGAGAGGAGCTGGTGTTGTTGGGCAGTGCTAGGA | |
| who had non-Hodgkin | ACTGGATGGAGAATATT | 219 |
| lymphoma diagnosed | AATATTCTCCATCCAGT | 220 |
| at age 17 and colon | | |
| carcinoma at age 26. | | |
| CGC-CCC | AATGGTTCACTGAAGACCCAGGTCCAGATGAAGCTCCCAGAA | 221 |
| Arg-72 to Pro | TGCCAGAGGCTGCTCCCCGCGTGGCCCCTGCACCAGCAGCT | |
| association with Lung | CCTACACCGGCGGCCCCTGCACCAGCCCCCTCCTGGCC | |
| cancer | GGCCAGGAGGGGGCTGGTGCAGGGGCCGCCGGTGTAGGAG | 222 |
| | CTGCTGGTGCAGGGGCCACGCGGGGAGCAGCCTCTGGCATT | |
| | CTGGGAGCTTCATCTGGACCTGGGTCTTCAGTGAACCATT | |
| | TGCTCCCCGCGTGGCCC | 223 |
| | GGGCCACGCGGGGAGCA | 224 |
| CCG-CTG | AAGCTCCCAGAATGCCAGAGGCTGCTCCCCGCGTGGCCCCT | 225 |
| Pro-82 to Leu | GCACCAGCAGCTCCTACACCGGCGGCCCCTGCACCAGCCCC | |
| Breast cancer | CTCCTGGCCCCTGTCATCTTCTGTCCCTTCCCAGAAAAC | |
| | GTTTTCTGGGAAGGGACAGAAGATGACAGGGGCCAGGAGGG | 226 |
| | GGCTGGTGCAGGGGCCGCCGGTGTAGGAGCTGCTGGTGCA | |
| | GGGGCCACGCGGGGAGCAGCCTCTGGCATTCTGGGAGCTT | |
| | TCCTACACCGGCGGCCC | 227 |
| | GGGCCGCCGGTGTAGGA | 228 |
| cCAA-TAA | TTCAACTCTGTCTCCTTCCTCTTCCTACAGTACTCCCCTGCCC | 229 |
| Gln-136 to Term | TCAACAAGATGTTTTGCCAACTGGCCAAGACCTGCCCTGTGC | |
| Li-Fraumeni syndrome | AGCTGTGGGTTGATTCCACACCCCCGCCCGGCACCC | |
| | GGGTGCCGGGCGGGGGTGTGGAATCAACCCACAGCTGCACA | 230 |
| | GGGCAGGTCTTGGCCAGTTGGCAAAACATCTTGTTGAGGGCA | |
| | GGGGAGTACTGTAGGAAGAGGAAGGAGACAGAGTTGAA | |
| | TGTTTTGCCAACTGGCC | 231 |
| | GGCCAGTTGGCAAAACA | 232 |
| TGC-TAC | TCCTCTTCCTACAGTACTCCCCTGCCCTCAACAAGATGTTTTG | 233 |
| Cys-141 to Tyr | CCAACTGGCCAAGACCTGCCCTGTGCAGCTGTGGGTTGATTC | |
| Li-Fraumeni syndrome | CACACCCCCGCCCGGCACCCGCGTCCGCGCCATGGC | |
| | GCCATGGCGCGGACGCGGGTGCCGGGCGGGGGTGTGGAAT | 234 |
| | CAACCCACAGCTGCACAGGGCAGGTCTTGGCCAGTTGGCAA | |
| | AACATCTTGTTGAGGGCAGGGGAGTACTGTAGGAAGAGGA | |
| | CAAGACCTGCCCTGTGC | 235 |
| | GCACAGGGCAGGTCTTG | 236 |
| aCCC-TCC | AACAAGATGTTTTGCCAACTGGCCAAGACCTGCCCTGTGCAG | 237 |
| Pro-151 to Ser | CTGTGGGTTGATTCCACACCCCCGCCCGGCACCCGCGTCCG | |
| Li-Fraumeni syndrome | CGCCATGGCCATCTACAAGCAGTCACAGCACATGACGG | |
| | CCGTCATGTGCTGTGACTGCTTGTAGATGGCCATGGCGCGGA | 238 |
| | CGCGGGTGCCGGGCGGGGGTGTGGAATCAACCCACAGCTG | |
| | CACAGGGCAGGTCTTGGCCAGTTGGCAAAACATCTTGTT | |
| | ATTCCACACCCCCGCCC | 239 |
| | GGGCGGGGGTGTGGAAT | 240 |
| CCG-CTG | AGATGTTTTGCCAACTGGCCAAGACCTGCCCTGTGCAGCTGT | 241 |
| Pro-152 to Leu | GGGTTGATTCCACACCCCCGCCCGGCACCCGCGTCCGCGCC | |
| Adrenocortical | ATGGCCATCTACAAGCAGTCACAGCACATGACGGAGGT | |
| carcinoma | ACCTCCGTCATGTGCTGTGACTGCTTGTAGATGGCCATGGCG | 242 |
| | CGGACGCGGGTGCCGGGCGGGGGTGTGGAATCAACCCACA | |
| | GCTGCACAGGGCAGGTCTTGGCCAGTTGGCAAAACATCT | |
| | CACACCCCCGCCCGGCA | 243 |
| | TGCCGGGCGGGGGTGTG | 244 |
| GGC-GTC | TTTGCCAACTGGCCAAGACCTGCCCTGTGCAGCTGTGGGTTG | 245 |
| Gly-154 to Val | ATTCCACACCCCCGCCCGGCACCCGCGTCCGCGCCATGGCC | |
| Glioblastoma | ATCTACAAGCAGTCACAGCACATGACGGAGGTTGTGAG | |
| | CTCACAACCTCCGTCATGTGCTGTGACTGCTTGTAGATGGCC | 246 |
| | ATGGCGCGGACGCGGGTGCCGGGCGGGGGTGTGGAATCAA | |
| | CCCACAGCTGCACAGGGCAGGTCTTGGCCAGTTGGCAAA | |
| | CCCGCCCGGCACCCGCG | 247 |
| | CGCGGGTGCCGGGCGGG | 248 |
| CGC-CAC | CCCGCGTCCGCGCCATGGCCATCTACAAGCAGTCACAGCAC | 249 |
| Arg-175 to His | ATGACGGAGGTTGTGAGGCGCTGCCCCCACCATGAGCGCTG | |
| Li-Fraumeni syndrome | CTCAGATAGCGATGGTGAGCAGCTGGGGCTGGAGAGACG | |
| | CGTCTCTCCAGCCCCAGCTGCTCACCATCGCTATCTGAGCAG | 250 |
| | CGCTCATGGTGGGGGCAGCGCCTCACAACCTCCGTCATGTG | |
| | CTGTGACTGCTTGTAGATGGCCATGGCGCGGACGCGGG | |
| | TGTGAGGCGCTGCCCCC | 251 |
| | GGGGGCAGCGCCTCACA | 252 |
| tGAG-AAG | ATGGCCATCTACAAGCAGTCACAGCACATGACGGAGGTTGTG | 253 |
| Glu-180 to Lys | AGGCGCTGCCCCCACCATGAGCGCTGCTCAGATAGCGATGG | |
| Li-Fraumeni syndrome | TGAGCAGCTGGGGCTGGAGAGACGACAGGGCTGGTTGC | |
| | GCAACCAGCCCTGTCGTCTCTCCAGCCCCAGCTGCTCACCAT | 254 |
| | CGCTATCTGAGCAGCGCTCATGGTGGGGGCAGCGCCTCACA | |
| | ACCTCCGTCATGTGCTGTGACTGCTTGTAGATGGCCAT | |
| | CCCACCATGAGCGCTGC | 255 |
| | GCAGCGCTCATGGTGGG | 256 |
| gCGC-TGC | GCCATCTACAAGCAGTCACAGCACATGACGGAGGTTGTGAGG | 257 |
| Arg-181 to Cys | CGCTGCCCCCACCATGAGCGCTGCTCAGATAGCGATGGTGA | |
| Breast cancer | GCAGCTGGGGCTGGAGAGACGACAGGGCTGGTTGCCCA | |
| | TGGGCAACCAGCCCTGTCGTCTCTCCAGCCCCAGCTGCTCAC | 258 |
| | CATCGCTATCTGAGCAGCGCTCATGGTGGGGGCAGCGCCTC | |
| | ACAACCTCCGTCATGTGCTGTGACTGCTTGTAGATGGC | |
| | ACCATGAGCGCTGCTCA | 259 |
| | TGAGCAGCGCTCATGGT | 260 |
| CGC-CAC | CCATCTACAAGCAGTCACAGCACATGACGGAGGTTGTGAGGC | 261 |
| Arg-81 to His | GCTGCCCCCACCATGAGCGCTGCTCAGATAGCGATGGTGAG | |
| Breast cancer | CAGCTGGGGCTGGAGAGACGACAGGGCTGGTTGCCCAG | |
| | CTGGGCAACCAGCCCTGTCGTCTCTCCAGCCCCAGCTGCTCA | 262 |
| | CCATCGCTATCTGAGCAGCGCTCATGGTGGGGGCAGCGCCT | |
| | CACAACCTCCGTCATGTGCTGTGACTGCTTGTAGATGG | |
| | CCATGAGCGCTGCTCAG | 263 |
| | CTGAGCAGCGCTCATGG | 264 |
| CAT-CGT | CCAGGGTCCCCAGGCCTCTGATTCCTCACTGATTGCTCTTAG | 265 |
| His-193 to Arg | GTCTGGCCCCTCCTCAGCATCTTATCCGAGTGGAAGGAAATT | |
| Li-Fraumeni syndrome | TGCGTGTGGAGTATTTGGATGACAGAAACACTTTTCG | |
| | CGAAAAGTGTTTCTGTCATCCAAATACTCCACACGCAAATTTC | 266 |
| | CTTCCACTCGGATAAGATGCTGAGGAGGGGCCAGACCTAAGA | |
| | GCAATCAGTGAGGAATCAGAGGCCTGGGGACCCTGG | |
| | TCCTCAGCATCTTATCC | 267 |
| | GGATAAGATGCTGAGGA | 268 |
| cCGA-TGA | CCCAGGCCTCTGATTCCTCACTGATTGCTCTTAGGTCTGGCC | 269 |
| Arg-196 to Term | CCTCCTCAGCATCTTATCCGAGTGGAAGGAAATTTGCGTGTG | |
| Adrenocortical | GAGTATTTGGATGACAGAAACACTTTTCGACATAGTG | |
| carcinoma | CACTATGTCGAAAAGTGTTTCTGTCATCCAAATACTCCACACG | 270 |
| | CAAATTTCCTTCCACTCGGATAAGATGCTGAGGAGGGGCCAG | |
| | ACCTAAGAGCAATCAGTGAGGAATCAGAGGCCTGGG | |
| | ATCTTATCCGAGTGGAA | 271 |
| | TTCCACTCGGATAAGAT | 272 |
| cAGA-TGA | GCCCCTCCTCAGCATCTTATCCGAGTGGAAGGAAATTTGCGT | 273 |
| Arg-209 to Term | GTGGAGTATTTGGATGACAGAAACACTTTTCGACATAGTGTG | |
| Li-Fraumeni syndrome | GTGGTGCCCTATGAGCCGCCTGAGGTCTGGTTTGCAA | |
| | TTGCAAACCAGACCTCAGGCGGCTCATAGGGCACCACCACAC | 274 |
| | TATGTCGAAAAGTGTTTCTGTCATCCAAATACTCCACACGCAA | |
| | ATTTCCTTCCACTCGGATAAGATGCTGAGGAGGGGC | |
| | TGGATGACAGAAACACT | 275 |
| | AGTGTTTCTGTCATCCA | 276 |
| tCGA-TGA | CATCTTATCCGAGTGGAAGGAAATTTGCGTGTGGAGTATTTG | 277 |
| Arg-213 to Term | GATGACAGAAACACTTTTCGACATAGTGTGGTGGTGCCCTAT | |
| Li-Fraumeni syndrome | GAGCCGCCTGAGGTCTGGTTTGCAACTGGGGTCTCTG | |
| | CAGAGACCCCAGTTGCAAACCAGACCTCAGGCGGCTCATAG | 278 |
| | GGCACCACCACACTATGTCGAAAAGTGTTTCTGTCATCCAAAT | |
| | ACTCCACACGCAAATTTCCTTCCACTCGGATAAGATG | |
| | ACACTTTTCGACATAGT | 279 |
| | ACTATGTCGAAAAGTGT | 280 |
| gCCC-TCC | GGAAATTTGCGTGTGGAGTATTTGGATGACAGAAACACTTTTC | 281 |
| Pro-219 to Ser | GACATAGTGTGGTGGTGCCCTATGAGCCGCCTGAGGTCTGG | |
| Adrenocortical | TTTGCAACTGGGGTCTCTGGGAGGAGGGGTTAAGGGT | |
| carcinoma | ACCCTTAACCCCTCCTCCCAGAGACCCCAGTTGCAAACCAGA | 282 |
| | CCTCAGGCGGCTCATAGGGCACCACCACACTATGTCGAAAAG | |
| | TGTTTCTGTCATCCAAATACTCCACACGCAAATTTCC | |
| | TGGTGGTGCCCTATGAG | 283 |
| | CTCATAGGGCACCACCA | 284 |
| TAT-TGT | ATTTGCGTGTGGAGTATTTGGATGACAGAAACACTTTTCGACA | 285 |
| Tyr-220 to Cys | TAGTGTGGTGGTGCCCTATGAGCCGCCTGAGGTCTGGTTTGC | |
| Li-Fraumeni syndrome | AACTGGGGTCTCTGGGAGGAGGGGTTAAGGGTGGTT | |
| | AACCACCCTTAACCCCTCCTCCCAGAGACCCCAGTTGCAAAC | 286 |
| | CAGACCTCAGGCGGCTCATAGGGCACCACCACACTATGTCGA | |
| | AAAGTGTTTCTGTCATCCAAATACTCCACACGCAAAT | |
| | GGTGCCCTATGAGCCGC | 287 |
| | GCGGCTCATAGGGCACC | 288 |
| cTCT-ACT | CACAGGTCTCCCCAAGGCGCACTGGCCTCATCTTGGGCCTGT | 289 |
| Ser-227 to Thr | GTTATCTCCTAGGTTGGCTCTGACTGTACCACCATCCACTACA | |
| Rhabdomyosarcoma | ACTACATGTGTAACAGTTCCTGCATGGGCGGCATGA | |
| | TCATGCCGCCCATGCAGGAACTGTTACACATGTAGTTGTAGT | 290 |
| | GGATGGTGGTACAGTCAGAGCCAACCTAGGAGATAACACAG | |
| | GCCCAAGATGAGGCCAGTGCGCCTTGGGGAGACCTGTG | |
| | AGGTTGGCTCTGACTGT | 291 |
| | ACAGTCAGAGCCAACCT | 292 |
| cCAC-AAC | GCACTGGCCTCATCTTGGGCCTGTGTTATCTCCTAGGTTGGC | 293 |
| His-233 to Asn | TCTGACTGTACCACCATCCACTACAACTACATGTGTAACAGTT | |
| Glioma | CCTGCATGGGCGGCATGAACCGGAGGCCCATCCTCA | |
| | TGAGGATGGGCCTCCGGTTCATGCCGCCCATGCAGGAACTG | 294 |
| | TTACACATGTAGTTGTAGTGGATGGTGGTACAGTCAGAGCCA | |
| | ACCTAGGAGATAACACAGGCCCAAGATGAGGCCAGTGC | |
| | CCACCATCCACTACAAC | 295 |
| | GTTGTAGTGGATGGTGG | 296 |
| cAAC-GAC | GCCTCATCTTGGGCCTGTGTTATCTCCTAGGTTGGCTCTGAC | 297 |
| Asn-235 to Asp | TGTACCACCATCCACTACAACTACATGTGTAACAGTTCCTGCA | |
| Adrenocortical | TGGGCGGCATGAACCGGAGGCCCATCCTCACCATCA | |
| carcinoma | TGATGGTGAGGATGGGCCTCCGGTTCATGCCGCCCATGCAG | 298 |
| | GAACTGTTACACATGTAGTTGTAGTGGATGGTGGTACAGTCA | |
| | GAGCCAACCTAGGAGATAACACAGGCCCAAGATGAGGC | |
| | TCCACTACAACTACATG | 299 |
| | CATGTAGTTGTAGTGGA | 300 |
| AAC-AGC | CCTCATCTTGGGCCTGTGTTATCTCCTAGGTTGGCTCTGACT | 301 |
| Asn-235 to Ser | GTACCACCATCCACTACAACTACATGTGTAACAGTTCCTGCAT | |
| Rhabdomyosarcoma | GGGCGGCATGAACCGGAGGCCCATCCTCACCATCAT | |
| | ATGATGGTGAGGATGGGCCTCCGGTTCATGCCGCCCATGCA | 302 |
| | GGAACTGTTACACATGTAGTTGTAGTGGATGGTGGTACAGTC | |
| | AGAGCCAACCTAGGAGATAACACAGGCCCAAGATGAGG | |
| | CCACTACAACTACATGT | 303 |
| | ACATGTAGTTGTAGTGG | 304 |
| ATCc-ATG | CATCCACTACAACTACATGTGTAACAGTTCCTGCATGGGCGG | 305 |
| Ile-251 to Met | CATGAACCGGAGGCCCATCCTCACCATCATCACACTGGAAGA | |
| Glioma | CTCCAGGTCAGGAGCCACTTGCCACCCTGCACACTGG | |
| | CCAGTGTGCAGGGTGGCAAGTGGCTCCTGACCTGGAGTCTT | 306 |
| | CCAGTGTGATGATGGTGAGGATGGGCCTCCGGTTCATGCCG | |
| | CCCATGCAGGAACTGTTACACATGTAGTTGTAGTGGATG | |
| | AGGCCCATCCTCACCAT | 307 |
| | ATGGTGAGGATGGGCCT | 308 |
| ACA-ATA | ACATGTGTAACAGTTCCTGCATGGGCGGCATGAACCGGAGG | 309 |
| Thr-256 to Ile | CCCATCCTCACCATCATCACACTGGAAGACTCCAGGTCAGGA | |
| Glioblastoma | GCCACTTGCCACCCTGCACACTGGCCTGCTGTGCCCCA | |
| | TGGGGCACAGCAGGCCAGTGTGCAGGGTGGCAAGTGGCTCC | 310 |
| | TGACCTGGAGTCTTCCAGTGTGATGATGGTGAGGATGGGCCT | |
| | CCGGTTCATGCCGCCCATGCAGGAACTGTTACACATGT | |
| | CATCATCACACTGGAAG | 311 |
| | CTTCCAGTGTGATGATG | 312 |
| CTG-CAG | TGTGTAACAGTTCCTGCATGGGCGGCATGAACCGGAGGCCC | 313 |
| Leu-257 to Gln | ATCCTCACCATCATCACACTGGAAGACTCCAGGTCAGGAGCC | |
| Li-Fraumeni syndrome | ACTTGCCACCCTGCACACTGGCCTGCTGTGCCCCAGCC | |
| | GGCTGGGGCACAGCAGGCCAGTGTGCAGGGTGGCAAGTGG | 314 |
| | CTCCTGACCTGGAGTCTTCCAGTGTGATGATGGTGAGGATGG | |
| | GCCTCCGGTTCATGCCGCCCATGCAGGAACTGTTACACA | |
| | CATCACACTGGAAGACT | 315 |
| | AGTCTTCCAGTGTGATG | 316 |
| CTG-CCG | GACCTGATTTCCTTACTGCCTCTTGCTTCTCTTTTCCTATCCTG | 317 |
| Leu-265 to Pro | AGTAGTGGTAATCTACTGGGACGGAACAGCTTTGAGGTGCGT | |
| Li-Fraumeni syndrome | GTTTGTGCCTGTCCTGGGAGAGACCGGCGCACAGA | |
| | TCTGTGCGCCGGTCTCTCCCAGGACAGGCACAAACACGCAC | 318 |
| | CTCAAAGCTGTTCCGTCCCAGTAGATTACCACTACTCAGGATA | |
| | GGAAAAGAGAAGCAAGAGGCAGTAAGGAAATCAGGTC | |
| | TAATCTACTGGGACGGA | 319 |
| | TCCGTCCCAGTAGATTA | 320 |
| gCGT-TGT | TGCTTCTCTTTTCCTATCCTGAGTAGTGGTAATCTACTGGGAC | 321 |
| Arg-273 to Cys | GGAACAGCTTTGAGGTGCGTGTTTGTGCCTGTCCTGGGAGAG | |
| Li-Fraumeni syndrome | ACCGGCGCACAGAGGAAGAGAATCTCCGCAAGAAAG | |
| | CTTTCTTGCGGAGATTCTCTTCCTCTGTGCGCCGGTCTCTCC | 322 |
| | CAGGACAGGCACAAACACGCACCTCAAAGCTGTTCCGTCCCA | |
| | GTAGATTACCACTACTCAGGATAGGAAAAGAGAAGCA | |
| | TTGAGGTGCGTGTTTGT | 323 |
| | ACAAACACGCACCTCAA | 324 |
| TGT-TAT | CTTTTCCTATCCTGAGTAGTGGTAATCTACTGGGACGGAACA | 325 |
| Cys-275 to Tyr | GCTTTGAGGTGCGTGTTTGTGCCTGTCCTGGGAGAGACCGG | |
| Li-Fraumeni syndrome | CGCACAGAGGAAGAGAATCTCCGCAAGAAAGGGGAGCC | |
| | GGCTCCCCTTTCTTGCGGAGATTCTCTTCCTCTGTGCGCCGG | 326 |
| | TCTCTCCCAGGACAGGCACAAACACGCACCTCAAAGCTGTTC | |
| | CGTCCCAGTAGATTACCACTACTCAGGATAGGAAAAG | |
| | GCGTGTTTGTGCCTGTC | 327 |
| | GACAGGCACAAACACGC | 328 |
| CCT-CTT | TCCTGAGTAGTGGTAATCTACTGGGACGGAACAGCTTTGAGG | 329 |
| Pro-278 to Leu | TGCGTGTTTGTGCCTGTCCTGGGAGAGACCGGCGCACAGAG | |
| Breast cancer | GAAGAGAATCTCCGCAAGAAAGGGGAGCCTCACCACGA | |
| | TCGTGGTGAGGCTCCCCTTTCTTGCGGAGATTCTCTTCCTCT | 330 |
| | GTGCGCCGGTCTCTCCCAGGACAGGCACAAACACGCACCTC | |
| | AAAGCTGTTCCGTCCCAGTAGATTACCACTACTCAGGA | |
| | TGCCTGTCCTGGGAGAG | 331 |
| | CTCTCCCAGGACAGGCA | 332 |
| AGA-AAA | GTAGTGGTAATCTACTGGGACGGAACAGCTTTGAGGTGCGTG | 333 |
| Arg-280 to Lys | TTTGTGCCTGTCCTGGGAGAGACCGGCGCACAGAGGAAGAG | |
| Glioma | AATCTCCGCAAGAAAGGGGAGCCTCACCACGAGCTGCC | |
| | GGCAGCTCGTGGTGAGGCTCCCCTTTCTTGCGGAGATTCTCT | 334 |
| | TCCTCTGTGCGCCGGTCTCTCCCAGGACAGGCACAAACACG | |
| | CACCTCAAAGCTGTTCCGTCCCAGTAGATTACCACTAC | |
| | TCCTGGGAGAGACCGGC | 335 |
| | GCCGGTCTCTCCCAGGA | 336 |
| GAA-GCA | GGAACAGCTTTGAGGTGCGTGTTTGTGCCTGTCCTGGGAGAG | 337 |
| Glu-286 to Ala | ACCGGCGCACAGAGGAAGAGAATCTCCGCAAGAAAGGGGAG | |
| Adrenocortical | CCTCACCACGAGCTGCCCCCAGGGAGCACTAAGCGAGG | |
| carcinoma | CCTCGCTTAGTGCTCCCTGGGGGCAGCTCGTGGTGAGGCTC | 338 |
| | CCCTTTCTTGCGGAGATTCTCTTCCTCTGTGCGCCGGTCTCT | |
| | CCCAGGACAGGCACAAACACGCACCTCAAAGCTGTTCC | |
| | AGAGGAAGAGAATCTCC | 339 |
| | GGAGATTCTCTTCCTCT | 340 |
| CGA-CCA | AAGAGAATCTCCGCAAGAAAGGGGAGCCTCACCACGAGCTG | 341 |
| Arg-306 to Pro | CCCCCAGGGAGCACTAAGCGAGGTAAGCAAGCAGGACAAGA | |
| Rhabdomyosarcoma | AGCGGTGGAGGAGACCAAGGGTGCAGTTATGCCTCAGAT | |
| | ATCTGAGGCATAACTGCACCCTTGGTCTCCTCCACCGCTTCTT | 342 |
| | GTCCTGCTTGCTTACCTCGCTTAGTGCTCCCTGGGGGCAGCT | |
| | CGTGGTGAGGCTCCCCTTTCTTGCGGAGATTCTCTT | |
| | CACTAAGCGAGGTAAGC | 343 |
| | GCTTACCTCGCTTAGTG | 344 |
| gCGA-TGA | GAAGAGAATCTCCGCAAGAAAGGGGAGCCTCACCACGAGCT | 345 |
| Arg-306 to Term | GCCCCCAGGGAGCACTAAGCGAGGTAAGCAAGCAGGACAAG | |
| Li-Fraumeni syndrome | AAGCGGTGGAGGAGACCAAGGGTGCAGTTATGCCTCAGA | |
| | TCTGAGGCATAACTGCACCCTTGGTCTCCTCCACCGCTTCTT | 346 |
| | GTCCTGCTTGCTTACCTCGCTTAGTGCTCCCTGGGGGCAGCT | |
| | CGTGGTGAGGCTCCCCTTTCTTGCGGAGATTCTCTTC | |
| | GCACTAAGCGAGGTAAG | 347 |
| | CTTACCTCGCTTAGTGC | 348 |
| gCGC-TGC | GGTACTGTGAATATACTTACTTCTCCCCCTCCTCTGTTGCTGC | 349 |
| Arg-337 to Cys | AGATCCGTGGGCGTGAGCGCTTCGAGATGTTCCGAGAGCTG | |
| Osteosarcoma | AATGAGGCCTTGGAACTCAAGGATGCCCAGGCTGGGA | |
| | TCCCAGCCTGGGCATCCTTGAGTTCCAAGGCCTCATTCAGCT | 350 |
| | CTCGGAACATCTCGAAGCGCTCACGCCCACGGATCTGCAGC | |
| | AACAGAGGAGGGGGAGAAGTAAGTATATTCACAGTACC | |
| | GGCGTGAGCGCTTCGAG | 351 |
| | CTCGAAGCGCTCACGCC | 352 |
| CTG-CCG | CTCCCCCTCCTCTGTTGCTGCAGATCCGTGGGCGTGAGCGCT | 353 |
| Leu-344 to Pro | TCGAGATGTTCCGAGAGCTGAATGAGGCCTTGGAACTCAAGG | |
| Li-Fraumeni syndrome | ATGCCCAGGCTGGGAAGGAGCCAGGGGGGAGCAGGGC | |
| | GCCCTGCTCCCCCCTGGCTCCTTCCCAGCCTGGGCATCCTTG | 354 |
| | AGTTCCAAGGCCTCATTCAGCTCTCGGAACATCTCGAAGCGC | |
| | TCACGCCCACGGATCTGCAGCAACAGAGGAGGGGGAG | |
| | CCGAGAGCTGAATGAGG | 355 |
| | CCTCATTCAGCTCTCGG | 356 |

### EXAMPLE 7

### Beta Globin

[0209] Hemoglobin, the major protein in the red blood cell, binds oxygen reversibly and is responsible for the cells' capacity to transport oxygen to the tissues. In adults, the major hemoglobin is hemoglobin A, a tetrameric protein consisting of two identical alpha globin chains and two beta globin chains. Disorders involving hemoglobin are among the most common genetic disorders worldwide, with approximately 5% of the world's population being carriers for clinically important hemoglobin mutations. Approximately 300,000 severely affected homozygotes or compound heterozygotes are born each year.

[0210] Mutation of the glutamic acid at position 7 in beta globin to valine causes sickle cell anemia, the clinical manifestations of which are well known. Mutations that cause absence of beta chain cause beta-zero-thalassemia. Reduced amounts of detectable beta globin causes beta-plus-thalassemia. For clinical purposes, beta-thalassemia is divided into thalassemia major (transfusion dependent), thalassemia intermedia (of intermediate severity), and thalassemia minor (asymptomatic). Patients with thalassemia major present in the first year of life with severe anemia; they are unable to maintain a hemoglobin level about 5 gm/dl.

[0211] The beta-thalassemias were among the first human genetic diseases to be examined by means of recombinant DNA analysis. Baysal et al., Hemoglobin 19(3-4):213-36 (1995) and others provide a compendium of mutations that result in beta-thalassemia.

[0212] Hemoglobin disorders were among the first to be considered for gene therapy. Transcriptional silencing of genes transferred into hematopoietic stem cells, however, poses one of the most significant challenges to its success. If the transferred gene is not completely silenced, a progressive decline in gene expression is often observed. Position effect variegation (PEV) and silencing mechanisms may act on a transferred globin gene residing in chromatin outside of the normal globin locus during the important terminal phases of erythroblast development when globin transcripts normally accumulate rapidly despite heterochromatization and shutdown of the rest of the genome. The attached table discloses the correcting oligonucleotide base sequences for the beta globin oligonucleotides of the invention.

TABLE 8
Beta Globin Mutations and Genome-Correcting Oligos

| | | |
|---|---|---|
| Clinical Phenotype & | | SEQ ID |
| Mutation | Correcting Oligos | NO: |

| | | |
|---|---|---|
| Sickle Cell Anemia | TCTGACACAACTGTGTTCACTAGCAACCTCAAACAGACACCA | 357 |
| GLU-7-VAL | TGGTGCACCTGACTCCTGAGGAGAAGTCTGCCGTTACTGCC | |
| GAG to GTG | CTGTGGGGCAAGGTGAACGTGGATGAAGTTGGTGGTGA | |
| | TCACCACCAACTTCATCCACGTTCACCTTGCCCCACAGGGCA | 358 |
| | GTAACGGCAGACTTCTCCTCAGGAGTCAGGTGCACCATGGT | |
| | GTCTGTTTGAGGTTGCTAGTGAACACAGTTGTGTCAGA | |
| | GACTCCTGAGGAGAAGT | 359 |
| | ACTTCTCCTCAGGAGTC | 360 |
| Thalassaemia Beta | CTATTGCTTACATTTGCTTCTGACACAACTGTGTTCACTAGCA | 361 |
| MET-0-ARG | ACCTCAAACAGACACCATGGTGCACCTGACTCCTGAGGAGA | |
| ATG to AGG | AGTCTGCCGTTACTGCCCTGTGGGGCAAGGTGAACGT | |
| | ACGTTCACCTTGCCCCACAGGGCAGTAACGGCAGACTTCTC | 362 |
| | CTCAGGAGTCAGGTGCACCATGGTGTCTGTTTGAGGTTGCTA | |
| | GTGAACACAGTTGTGTCAGAAGCAAATGTAAGCAATAG | |
| | AGACACCATGGTGCACC | 363 |
| | GGTGCACCATGGTGTCT | 364 |
| Thalassaemia Beta | TATTGCTTACATTTGCTTCTGACACAACTGTGTTCACTAGCAA | 365 |
| MET-0-ILE | CCTCAAACAGACACCATGGTGCACCTGACTCCTGAGGAGAA | |
| ATG to ATA | GTCTGCCGTTACTGCCCTGTGGGGCAAGGTGAACGTG | |
| | CACGTTCACCTTGCCCCACAGGGCAGTAACGGCAGACTTCT | 366 |
| | CCTCAGGAGTCAGGTGCACCATGGTGTCTGTTTGAGGTTGCT | |
| | AGTGAACACAGTTGTGTCAGAAGCAAATGTAAGCAATA | |
| | GACACCATGGTGCACCT | 367 |
| | AGGTGCACCATGGTGTC | 368 |
| Thalassaemia Beta | TATTGCTTACATTTGCTTCTGACACAACTGTGTTCACTAGCAA | 369 |
| MET-0-ILE | CCTCAAACAGACACCATGGTGCACCTGACTCCTGAGGAGAA | |
| ATG to ATT | GTCTGCCGTTACTGCCCTGTGGGGCAAGGTGAACGTG | |
| | CACGTTCACCTTGCCCCACAGGGCAGTAACGGCAGACTTCT | 370 |
| | CCTCAGGAGTCAGGTGCACCATGGTGTCTGTTTGAGGTTGCT | |
| | AGTGAACACAGTTGTGTCAGAAGCAAATGTAAGCAATA | |
| | GACACCATGGTGCACCT | 371 |
| | AGGTGCACCATGGTGTC | 372 |
| Thalassaemia Beta | CTATTGCTTACATTTGCTTCTGACACAACTGTGTTCACTAGCA | 373 |
| MET-0-LYS | ACCTCAAACAGACACCATGGTGCACCTGACTCCTGAGGAGA | |
| ATG to AAG | AGTCTGCCGTTACTGCCCTGTGGGGCAAGGTGAACGT | |
| | ACGTTCACCTTGCCCCACAGGGCAGTAACGGCAGACTTCTC | 374 |
| | CTCAGGAGTCAGGTGCACCATGGTGTCTGTTTGAGGTTGCTA | |
| | GTGAACACAGTTGTGTCAGAAGCAAATGTAAGCAATAG | |
| | AGACACCATGGTGCACC | 375 |
| | GGTGCACCATGGTGTCT | 376 |
| Thalassaemia Beta | CTATTGCTTACATTTGCTTCTGACACAACTGTGTTCACTAGCA | 377 |
| MET-0-THR | ACCTCAAACAGACACCATGGTGCACCTGACTCCTGAGGAGA | |
| ATG to ACG | AGTCTGCCGTTACTGCCCTGTGGGGCAAGGTGAACGT | |
| | ACGTTCACCTTGCCCCACAGGGCAGTAACGGCAGACTTCTC | 378 |
| | CTCAGGAGTCAGGTGCACCATGGTGTCTGTTTGAGGTTGCTA | |
| | GTGAACACAGTTGTGTCAGAAGCAAATGTAAGCAATAG | |
| | AGACACCATGGTGCACC | 379 |
| | GGTGCACCATGGTGTCT | 380 |
| Thalassaemia Beta | TCTATTGCTTACATTTGCTTCTGACACAACTGTGTTCACTAGC | 381 |
| MET-0-VAL | AACCTCAAACAGACACCATGGTGCACCTGACTCCTGAGGAG | |
| ATG to GTG | AAGTCTGCCGTTACTGCCCTGTGGGGCAAGGTGAACG | |
| | CGTTCACCTTGCCCCACAGGGCAGTAACGGCAGACTTCTCC | 382 |
| | TCAGGAGTCAGGTGCACCATGGTGTCTGTTTGAGGTTGCTAG | |
| | TGAACACAGTTGTGTCAGAAGCAAATGTAAGCAATAGA | |
| | CAGACACCATGGTGGAC | 383 |
| | GTGCACCATGGTGTCTG | 384 |
| Thalassaemia Beta | TCAAACAGACACCATGGTGCACCTGACTCCTGAGGAGAAGT | 385 |
| TRP-16-Term | CTGCCGTTACTGCCCTGTGGGGCAAGGTGAACGTGGATGAA | |
| TGG to TGA | GTTGGTGGTGAGGCCCTGGGCAGGTTGGTATCAAGGTTA | |
| | TAACCTTGATACCAACCTGCCCAGGGCCTCACCACCAACTTC | 386 |
| | ATCCACGTTCACCTTGCCCCACAGGGCAGTAACGGCAGACT | |
| | TCTCCTCAGGAGTCAGGTGCACCATGGTGTCTGTTTGA | |
| | GCCCTGTGGGGCAAGGT | 387 |
| | ACCTTGCCCCACAGGGC | 388 |
| Thalassaemia Beta | CTCAAACAGACACCATGGTGCACCTGACTCCTGAGGAGAAG | 389 |
| TRP-16-Term | TCTGCCGTTACTGCCCTGTGGGGCAAGGTGAACGTGGATGA | |
| TGG to TAG | AGTTGGTGGTGAGGCCCTGGGCAGGTTGGTATCAAGGTT | |
| | AACCTTGATACCAACCTGCCCAGGGCCTCACCACCAACTTCA | 390 |
| | TCCACGTTCACCTTGCCCCACAGGGCAGTAACGGCAGACTT | |
| | CTCCTCAGGAGTCAGGTGCACCATGGTGTCTGTTTGAG | |
| | TGCCCTGTGGGGCAAGG | 391 |
| | CCTTGCCCCACAGGGCA | 392 |
| Thalassaemia Beta | ACAGACACCATGGTGCACCTGACTCCTGAGGAGAAGTCTGC | 393 |
| LYS-18-Term | CGTTACTGCCCTGTGGGGCAAGGTGAACGTGGATGAAGTTG | |
| AAG to TAG | GTGGTGAGGCCCTGGGCAGGTTGGTATCAAGGTTACAAG | |
| | CTTGTAACCTTGATACCAACCTGCCCAGGGCCTCACCACCAA | 394 |
| | CTTCATCCACGTTCACCTTGCCCCACAGGGCAGTAACGGCA | |
| | GACTTCTCCTCAGGAGTCAGGTGCACCATGGTGTCTGT | |
| | TGTGGGGCAAGGTGAAC | 395 |
| | GTTCACCTTGCCCCACA | 396 |
| Thalassaemia Beta | CCATGGTGCACCTGACTCCTGAGGAGAAGTCTGCCGTTACT | 397 |
| ASN-20-SER | GCCCTGTGGGGCAAGGTGAACGTGGATGAAGTTGGTGGTGA | |
| AAC to AGC | GGCCCTGGGCAGGTTGGTATCAAGGTTACAAGACAGGTT | |
| | AACCTGTCTTGTAACCTTGATACCAACCTGCCCAGGGCCTCA | 398 |
| | CCACCAACTTCATCCACGTTCACCTTGCCCCACAGGGCAGTA | |
| | ACGGCAGACTTCTCCTCAGGAGTCAGGTGCACCATGG | |
| | CAAGGTGAACGTGGATG | 399 |
| | CATCCACGTTCACCTTG | 400 |
| Thalassaemia Beta | ACCTGACTCCTGAGGAGAAGTCTGCCGTTACTGCCCTGTGG | 401 |
| GLU-23-ALA | GGCAAGGTGAACGTGGATGAAGTTGGTGGTGAGGCCCTGG | |
| GAA to GCA | GCAGGTTGGTATCAAGGTTACAAGACAGGTTTAAGGAGAC | |
| | GTCTCCTTAAACCTGTCTTGTAACCTTGATACCAACCTGCCCA | 402 |
| | GGGCCTCACCACCAACTTCATCCACGTTCACCTTGCCCCACA | |
| | GGGCAGTAACGGCAGACTTCTCCTCAGGAGTCAGGT | |
| | CGTGGATGAAGTTGGTG | 403 |
| | CACCAACTTCATCCACG | 404 |
| Thalassaemia Beta | CACCTGACTCCTGAGGAGAAGTCTGCCGTTACTGCCCTGTG | 405 |
| GLU-23-term | GGGCAAGGTGAACGTGGATGAAGTTGGTGGTGAGGCCCTG | |
| GAA to TAA | GGCAGGTTGGTATCAAGGTTACAAGACAGGTTTAAGGAGA | |
| | TCTCCTTAAACCTGTCTTGTAACCTTGATACCAACCTGCCCAG | 406 |
| | GGCCTCACCACCAACTTCATCCACGTTCACCTTGCCCCACAG | |
| | GGCAGTAACGGCAGACTTCTCCTCAGGAGTCAGGTG | |
| | ACGTGGATGAAGTTGGT | 407 |
| | ACCAACTTCATCCACGT | 408 |
| Thalassaemia Beta | GAGGAGAAGACTGCTGTCAATGCCCTGTGGGGCAAAGTGAA | 409 |
| GLU-27-LYS | CGTGGATGCAGTTGGTGGTGAGGCCCTGGGCAGGTTGGTAT | |
| GAG to AAG | CAAGGTTATAAGAGAGGCTCAAGGAGGCAAATGGAAACT | |
| | AGTTTCCATTTGCCTCCTTGAGCCTCTCTTATAACCTTGATAC | 410 |
| | CAACCTGCCCAGGGCCTCACCACCAACTGCATCCACGTTCA | |
| | CTTTGCCCCACAGGGCATTGACAGCAGTCTTCTCCTC | |
| | TTGGTGGTGAGGCCCTG | 411 |
| | CAGGGCCTCACCACCAA | 412 |
| Thalassaemia Beta | GAGGAGAAGACTGCTGTCAATGCCCTGTGGGGCAAAGTGAA | 413 |
| GLU-27-Term | CGTGGATGCAGTTGGTGGTGAGGCCCTGGGCAGGTTGGTAT | |
| GAG to TAG | CAAGGTTATAAGAGAGGCTCAAGGAGGCAAATGGAAACT | |
| | AGTTTCCATTTGCCTCCTTGAGCCTCTCTTATAACCTTGATAC | 414 |
| | CAACCTGCCCAGGGCCTCACCACCAACTGCATCCACGTTCA | |
| | CTTTGCCCCACAGGGCATTGACAGCAGTCTTCTCCTC | |
| | TTGGTGGTGAGGCCCTG | 415 |
| | CAGGGCCTCACCACCAA | 416 |
| Thalassaemia Beta | GAGAAGACTGCTGTCAATGCCCTGTGGGGCAAAGTGAACGT | 417 |
| ALA-28-SER | GGATGCAGTTGGTGGTGAGGCCCTGGGCAGGTTGGTATCAA | |
| GCC to TCC | GGTTATAAGAGAGGCTCAAGGAGGCAAATGGAAACTGGG | |
| | CCCAGTTTCCATTTGCCTCCTTGAGCCTCTCTTATAACCTTGA | 418 |
| | TACCAACCTGCCCAGGGCCTCACCACCAACTGCATCCACGTT | |
| | CACTTTGCCCCACAGGGCATTGACAGCAGTCTTCTC | |
| | GTGGTGAGGCCCTGGGC | 419 |
| | GCCCAGGGCCTCACCAC | 420 |
| Thalassaemia Beta | CTGTCAATGCCCTGTGGGGCAAAGTGAACGTGGATGCAGTT | 421 |
| ARG-31-THR | GGTGGTGAGGCCCTGGGCAGGTTGGTATCAAGGTTATAAGA | |
| AGG to ACG | GAGGCTCAAGGAGGCAAATGGAAACTGGGCATGTGTAGA | |
| | TCTACACATGCCCAGTTTCCATTTGCCTCCTTGAGCCTCTCTT | 422 |
| | ATAACCTTGATACCAACCTGCCCAGGGCCTCACCACCAACTG | |
| | CATCCACGTTCACTTTGCCCCACAGGGCATTGACAG | |
| | CCTGGGCAGGTTGGTAT | 423 |
| | ATACCAACCTGCCCAGG | 424 |
| Thalassaemia Beta | TGGGTTTCTGATAGGCACTGACTCTCTGTCCCTTGGGCTGTT | 425 |
| Leu-33-GLN | TTCCTACCCTCAGATTACTGGTGGTCTACCCTTGGACCCAGA | |
| CTG to CAG | GGTTCTTTGAGTCCTTTGGGGATCTGTCCTCTCCTGA | |
| | TCAGGAGAGGACAGATCCCCAAAGGACTCAAAGAACCTCTG | 426 |
| | GGTCCAAGGGTAGACCACCAGTAATCTGAGGGTAGGAAAAC | |
| | AGCCCAAGGGACAGAGAGTCAGTGCCTATCAGAAACCCA | |
| | CAGATTACTGGTGGTCT | 427 |
| | AGACCACCAGTAATCTG | 428 |
| Thalassaemia Beta | ATAGGCACTGACTCTCTGTCCCTTGGGCTGTTTTCCTACCCT | 429 |
| TYR-36-Term | CAGATTACTGGTGGTCTACCCTTGGACCCAGAGGTTCTTTGA | |
| TAC to TAA | GTCCTTTGGGGATCTGTCCTCTCCTGATGCTGTTATG | |
| | CATAACAGCATCAGGAGAGGACAGATCCCCAAAGGACTCAA | 430 |
| | AGAACCTCTGGGTCCAAGGGTAGACCACCAGTAATCTGAGG | |
| | GTAGGAAAACAGCCCAAGGGACAGAGAGTCAGTGCCTAT | |
| | GTGGTCTACCCTTGGAC | 431 |
| | GTCCAAGGGTAGACCAC | 432 |
| Thalassaemia Beta | ACTGACTCTCTGTCCCTTGGGCTGTTTTCCTACCCTCAGATTA | 433 |
| TRP-38-Term | CTGGTGGTCTACCCTTGGACCCAGAGGTTCTTTGAGTCCTTT | |
| TGG to TGA | GGGGATCTGTCCTCTCCTGATGCTGTTATGGGCAAC | |
| | GTTGCCCATAACAGCATCAGGAGAGGACAGATCCCCAAAGG | 434 |
| | ACTCAAAGAACCTCTGGGTCCAAGGGTAGACCACCAGTAATC | |
| | TGAGGGTAGGAAAACAGCCCAAGGGACAGAGAGTCAGT | |
| | TACCCTTGGACCCAGAG | 435 |
| | CTCTGGGTCCAAGGGTA | 436 |
| Thalassaemia Beta | CACTGACTCTCTGTCCCTTGGGCTGTTTTCCTACCCTCAGAT | 437 |
| TRP-38-Term | TACTGGTGGTCTACCCTTGGACCCAGAGGTTCTTTGAGTCCT | |
| TGG to TAG | TTGGGGATCTGTCCTCTCCTGATGCTGTTATGGGCAA | |
| | TTGCCCATAACAGCATCAGGAGAGGACAGATCCCCAAAGGA | 438 |
| | CTCAAAGAACCTCTGGGTCCAAGGGTAGACCACCAGTAATCT | |
| | GAGGGTAGGAAAACAGCCCAAGGGACAGAGAGTCAGTG | |
| | CTACCCTTGGACCCAGA | 439 |
| | TCTGGGTCCAAGGGTAG | 440 |
| Thalassaemia Beta | ACTCTCTGTCCCTTGGGCTGTTTTCCTACCCTCAGATTACTG | 441 |
| GLN-40-Term | GTGGTCTACCCTTGGACCCAGAGGTTCTTTGAGTCCTTTGGG | |
| CAG-TAG | GATCTGTCCTCTCCTGATGCTGTTATGGGCAACCCTA | |
| | TAGGGTTGCCCATAACAGCATCAGGAGAGGACAGATCCCCA | 442 |
| | AAGGACTCAAAGAACCTCTGGGTCCAAGGGTAGACCACCAG | |
| | TAATCTGAGGGTAGGAAAACAGCCCAAGGGACAGAGAGT | |
| | CTTGGACCCAGAGGTTC | 443 |
| | GAACCTCTGGGTCCAAG | 444 |
| Thalassaemia Beta | TTGGGCTGTTTTCCTACCCTCAGATTACTGGTGGTCTACCCT | 445 |
| GLU-44-Term | TGGACCCAGAGGTTCTTTGAGTCCTTTGGGGATCTGTCCTCT | |
| GAG to TAG | CCTGATGCTGTTATGGGCAACCCTAAGGTGAAGGCTC | |
| | GAGCCTTCACCTTAGGGTTGCCCATAACAGCATCAGGAGAG | 446 |
| | GACAGATCCCCAAAGGACTCAAAGAACCTCTGGGTCCAAGG | |
| | GTAGACCACCAGTAATCTGAGGGTAGGAAAACAGCCCAA | |
| | GGTTCTTTGAGTCCTTT | 447 |
| | AAAGGACTCAAAGAACC | 448 |
| Thalassaemia Beta | TTCTTTGAGTCCTTTGGGGATCTGTCCTCTCCTGATGCTGTTA | 449 |
| LYS-62-Term | TGGGCAACCCTAAGGTGAAGGCTCATGGCAAGAAGGTGCTA | |
| AAG to TAG | GGTGCCTTTAGTGATGGCCTGGCTCACCTGGACAACC | |
| | GGTTGTCCAGGTGAGCCAGGCCATCACTAAAGGCACCTAGC | 450 |
| | ACCTTCTTGCCATGAGCCTTCACCTTAGGGTTGCCCATAACA | |
| | GCATCAGGAGAGGACAGATCCCCAAAGGACTCAAAGAA | |
| | CTAAGGTGAAGGCTCAT | 451 |
| | ATGAGCCTTCACCTTAG | 452 |
| Thalassaemia Beta | TGCTGTTATGGGCAACCCTAAGGTGAAGGCTCATGGCAAGA | 453 |
| SER-73-ARG | AGGTGCTAGGTGCCTTTAGTGATGGCCTGGCTCACCTGGAC | |
| AGT to AGA | AACCTCAAGGGCACTTTTTCTCAGCTGAGTGAGCTGCAC | |
| | GTGCAGCTCACTCAGCTGAGAAAAAGTGCCCTTGAGGTTGTC | 454 |
| | CAGGTGAGCCAGGCCATCACTAAAGGCACCTAGCACCTTCT | |
| | TGCCATGAGCCTTCACCTTAGGGTTGCCCATAACAGCA | |
| | GCCTTTAGTGATGGCCT | 455 |
| | AGGCCATCACTAAAGGC | 456 |
| Haemolytic Anaemia | TTATGGGCAACCCTAAGGTGAAGGCTCATGGCAAGAAGGTG | 457 |
| GLY-75-VAL | CTAGGTGCCTTTAGTGATGGCCTGGCTCACCTGGACAACCTC | |
| GGC to GTC | AAGGGCACTTTTTCTCAGCTGAGTGAGCTGCACTGTGA | |
| | TCACAGTGCAGCTCACTCAGCTGAGAAAAAGTGCCCTTGAG | 458 |
| | GTTGTCCAGGTGAGCCAGGCCATCACTAAAGGCACCTAGCA | |
| | CCTTCTTGCCATGAGCCTTCACCTTAGGGTTGCCCATAA | |
| | TAGTGATGGCCTGGCTC | 459 |
| | GAGCCAGGCCATCACTA | 460 |
| Thalassaemia Beta | GCCTTTAGTGATGGCCTGGCTCACCTGGACAACCTCAAGGG | 461 |
| GLU-91-Term | CACCTTTGCCACACTGAGTGAGCTGCACTGTGACAAGCTGCA | |
| GAG to TAG | CGTGGATCCTGAGAACTTCAGGGTGAGTCTATGGGACC | |
| | GGTCCCATAGACTCACCCTGAAGTTCTCAGGATCCACGTGCA | 462 |
| | GCTTGTCACAGTGCAGCTCACTCAGTGTGGCAAAGGTGCCC | |
| | TTGAGGTTGTCCAGGTGAGCCAGGCCATCACTAAAGGC | |
| | CACTGAGTGAGCTGCAC | 463 |
| | GTGCAGCTCACTCAGTG | 464 |
| Thalassaemia Beta | CTGGACAACCTCAAGGGCACTTTTTCTCAGCTGAGTGAGCTG | 465 |
| VAL-99-MET | CACTGTGACAAGCTGCACGTGGATCCTGAGAACTTCAGGGT | |
| GTG to ATG | GAGTCCAGGAGATGCTTCACTTTTCTCTTTTTACTTTC | |
| | GAAAGTAAAAAGAGAAAAGTGAAGCATCTCCTGGACTCACCC | 466 |
| | TGAAGTTCTCAGGATCCACGTGCAGCTTGTCACAGTGCAGCT | |
| | CACTCAGCTGAGAAAAAGTGCCCTTGAGGTTGTCCAG | |
| | AGCTGCACGTGGATCCT | 467 |
| | AGGATCCACGTGCAGCT | 468 |
| Thalassaemia Beta | CCCTTTTGCTAATCATGTTCATACCTCTTATCTTCCTCCCACA | 469 |
| LEU-111-PRO | GCTCCTGGGCAACGTGCTGGTCTGTGTGCTGGCCCATCACT | |
| CTG-CCG | TTGGCAAAGAATTCACCCCACCAGTGCAGGCTGCCTA | |
| | TAGGCAGCCTGCACTGGTGGGGTGAATTCTTTGCCAAAGTG | 470 |
| | ATGGGCCAGCACACAGACCAGCACGTTGCCCAGGAGCTGTG | |
| | GGAGGAAGATAAGAGGTATGAACATGATTAGCAAAAGGG | |
| | CAACGTGCTGGTCTGTG | 471 |
| | CACAGACCAGCACGTTG | 472 |
| Thalassaemia Beta | GCTAATCATGTTCATACCTCTTATCTTCCTCCCACAGCTCCTG | 473 |
| CYS-113-Term | GGCAACGTGCTGGTCTGTGTGCTGGCCCATCACTTTGGCAA | |
| TGT to TGA | AGAATTCACCCCACCAGTGCAGGCTGCCTATCAGAAA | |
| | TTTCTGATAGGCAGCCTGCACTGGTGGGGTGAATTCTTTGCC | 474 |
| | AAAGTGATGGGCCAGCACACAGACCAGCACGTTGCCCAGGA | |
| | GCTGTGGGAGGAAGATAAGAGGTATGAACATGATTAGC | |
| | CTGGTCTGTGTGCTGGC | 475 |
| | GCCAGCACACAGACCAG | 476 |
| Thalassaemia Beta | TCATGTTCATACCTCTTATCTTCCTCCCACAGCTCCTGGGCAA | 477 |
| LEU-115-PRO | CGTGCTGGTCTGTGTGCTGGCCCATCACTTTGGCAAAGAATT | |
| CTG to CCG | CACCCCACCAGTGCAGGCTGCCTATCAGAAAGTGGT | |
| | ACCACTTTCTGATAGGCAGCCTGCACTGGTGGGGTGAATTCT | 478 |
| | TTGCCAAAGTGATGGGCCAGCACACAGACCAGCACGTTGCC | |
| | CAGGAGCTGTGGGAGGAAGATAAGAGGTATGAACATGA | |
| | CTGTGTGCTGGCCCATC | 479 |
| | GATGGGCCAGCACACAG | 480 |
| Thalassaemia Beta | TGTTCATACCTCTTATCTTCCTCCCACAGCTCCTGGGCAACG | 481 |
| ALA-116-ASP | TGCTGGTCTGTGTGCTGGCCCATCACTTTGGCAAAGAATTCA | |
| GCC to GAC | CCCCACCAGTGCAGGCTGCCTATCAGAAAGTGGTGGC | |
| | GCCACCACTTTCTGATAGGCAGCCTGCACTGGTGGGGTGAA | 482 |
| | TTCTTTGCCAAAGTGATGGGCCAGCACACAGACCAGCACGTT | |
| | GCCCAGGAGCTGTGGGAGGAAGATAAGAGGTATGAACA | |
| | TGTGCTGGCCCATCACT | 483 |
| | AGTGATGGGCCAGCACA | 484 |
| Thalassaemia Beta | TTCCTCCCACAGCTCCTGGGCAACGTGCTGGTCTGTGTGCT | 485 |
| GLU-122-Term | GGCCCATCACTTTGGCAAAGAATTCACCCCACCAGTGCAGG | |
| GAA to TAA | CTGCCTATCAGAAAGTGGTGGCTGGTGTGGCTAATGCCC | |
| | GGGCATTAGCCACACCAGCCACCACTTTCTGATAGGCAGCC | 486 |
| | TGCACTGGTGGGGTGAATTCTTTGCCAAAGTGATGGGCCAG | |
| | CACACAGACCAGCACGTTGCCCAGGAGCTGTGGGAGGAA | |
| | TTGGCAAAGAATTCACC | 487 |
| | GGTGAATTCTTTGCCAA | 488 |
| Thalassaemia Beta | GCAACGTGCTGGTCTGTGTGCTGGCCCATCACTTTGGCAAA | 489 |
| GLN-128-PRO | GAATTCACCCCACCAGTGCAGGCTGCCTATCAGAAAGTGGT | |
| CAG to CCG | GGCTGGTGTGGCTAATGCCCTGGCCCACAAGTATCACTA | |
| | TAGTGATACTTGTGGGCCAGGGCATTAGCCACACCAGCCAC | 490 |
| | CACTTTCTGATAGGCAGCCTGCACTGGTGGGGTGAATTCTTT | |
| | GCCAAAGTGATGGGCCAGCACACAGACCAGCACGTTGC | |
| | ACCAGTGCAGGCTGCCT | 491 |
| | AGGCAGCCTGCACTGGT | 492 |
| Thalassaemia Beta | GGCAACGTGCTGGTCTGTGTGCTGGCCCATCACTTTGGCAA | 493 |
| GLN-128-Term | AGAATTCACCCCACCAGTGCAGGCTGCCTATCAGAAAGTGGT | |
| CAG to TAG | GGCTGGTGTGGCTAATGCCCTGGCCCACAAGTATCACT | |
| | AGTGATACTTGTGGGCCAGGGCATTAGCCACACCAGCCACC | 494 |
| | ACTTTCTGATAGGCAGCCTGCACTGGTGGGGTGAATTCTTTG | |
| | CCAAAGTGATGGGCCAGCACACAGACCAGCACGTTGCC | |
| | CACCAGTGCAGGCTGCC | 495 |
| | GGCAGCCTGCACTGGTG | 496 |
| Thalassaemia Beta | GTCTGTGTGCTGGCCCATCACTTTGGCAAAGAATTCACCCCA | 497 |
| GLN-132-LYS | CCAGTGCAGGCTGCCTATCAGAAAGTGGTGGCTGGTGTGGC | |
| CAG to AAG | TAATGCCCTGGCCCACAAGTATCACTAAGCTCGCTTTC | |
| | GAAAGCGAGCTTAGTGATACTTGTGGGCCAGGGCATTAGCC | 498 |
| | ACACCAGCCACCACTTTCTGATAGGCAGCCTGCACTGGTGG | |
| | GGTGAATTCTTTGCCAAAGTGATGGGCCAGCACACAGAC | |
| | CTGCCTATCAGAAAGTG | 499 |
| | CACTTTCTGATAGGCAG | 500 |

### EXAMPLE 8

### Retinoblastoma

[0213] Retinoblastoma (RB) is an embryonic neoplasm of retinal origin. It almost always presents in early childhood and is often bilateral. The risk of osteogenic sarcoma is increased 500-fold in bilateral retinoblastoma patients, the bone malignancy being at sites removed from those exposed to radiation treatment of the eye tumor.

[0214] The retinoblastoma susceptibility gene (pRB;pRb) plays a pivotal role in the regulation of the cell cycle. pRB restrains cell cycle progression by maintaining a checkpoint in late G₁ that controls commitment of cells to enter S phase. The critical role that pRB plays in cell cycle regulation explains its status as archetypal tumor suppressor:loss of pRB function results in an inability to maintain control of the G₁ checkpoint; unchecked progression through the cell cycle is, in turn, a hallmark of neoplasia.

[0215] Blanquet et al., Hum. Molec. Genet. 4: 383-388 (1995) performed a mutation survey of the RB1 gene in 232 patients with hereditary or nonhereditary retinoblastoma. They systematically explored all 27 exons and flanking sequences, as well as the promoter. All types of point mutations were represented and found to be unequally distributed along the RB1 gene sequence. In the population studied, exons 3, 8, 18, and 19 were preferentially altered. The attached table discloses the correcting oligonucleotide base sequences for the retinoblastoma oligonucleotides of the invention.

TABLE 9
pRB Mutations and Genome-Correcting Oligos

| Clinical Phenotype & | | SEQ ID |
|---|---|---|
| Mutation | Correcting Oligos | NO: |
| Retinoblastoma | AATATTTGATCTTTATTTTTTGTTCCCAGGGAGGTTATATTCAA | 501 |
| Trp99Term | AAGAAAAAGGAACTGTGGGGAATCTGTATCTTTATTGCAGCA | |
| TGG-TAG | GTTGACCTAGATGAGATGTCGTTCACTTTTACTGA | |
| | TCAGTAAAAGTGAACGACATCTCATCTAGGTCAACTGCTGCA | 502 |
| | ATAAAGATACAGATTCCCCACAGTTCCTTTTTCTTTTGAATATA | |
| | ACCTCCCTGGGAACAAAAAATAAAGATCAAATATT | |
| | GGAACTGTGGGGAATCT | 503 |
| | AGATTCCCCACAGTTCC | 504 |
| Retinoblastoma | ATTTACTTTTTTCTATTCTTTCCTTTGTAGTGTCCATAAATTCTT | 505 |
| Glu137Asp | TAACTTACTAAAAGAAATTGATACCAGTACCAAAGTTGATAAT | |
| GAA-GAT | GCTATGTCAAGACTGTTGAAGAAGTATGATGTA | |
| | TACATCATACTTCTTCAACAGTCTTGACATAGCATTATCAACT | 506 |
| | TTGGTACTGGTATCAATTTCTTTTAGTAAGTTAAAGAATTTATG | |
| | GACACTACAAAGGAAAGAATAGAAAAAAGTAAAT | |
| | CTAAAAGAAATTGATAC | 507 |
| | GTATCAATTTCTTTTAG | 508 |
| Retinoblastoma | TGATTTACTTTTTTCTATTCTTTCCTTTGTAGTGTCCATAAATT | 509 |
| Glu137Term | CTTTAACTTACTAAAAGAAATTGATACCAGTACCAAAGTTGAT | |
| GAA-TAA | AATGCTATGTCAAGACTGTTGAAGAAGTATGATG | |
| | CATCATACTTCTTCAACAGTCTTGACATAGCATTATCAACTTT | 510 |
| | GGTACTGGTATCAATTTCTTTTAGTAAGTTAAAGAATTTATGG | |
| | ACACTACAAAGGAAAGAATAGAAAAAAGTAAATCA | |
| | TACTAAAAGAAATTGAT | 511 |
| | ATCAATTTCTTTTAGTA | 512 |
| Retinoblastoma | AAAATGTTAAAAAGTCATAATGTTTTTCTTTTCAGGACATGTG | 513 |
| Gln176Term | AACTTATATATTTGACACAACCCAGCAGTTCGTAAGTAGTTCA | |
| C | CAGAATGTTATTTTTCACTTAAAAAAAAAGATTTT | |
| | AAAATCTTTTTTTTTAAGTGAAAAATAACATTCTGTGAACTACT | 514 |
| | TACGAACTGCTGGGTTGTGTCAAATATATAAGTTCACATGTCC | |
| | TGAAAAGAAAAACATTATGACTTTTTAACATTTT | |
| | ATTTGACACAACCCAGC | 515 |
| | GCTGGGTTGTGTCAAAT | 516 |
| Retinoblastoma | TGATACATTTTTCCTGTTTTTTTTCTGCTTTCTATTTGTTTAATA | 517 |
| Ile185Thr | GGATATCTACTGAAATAAATTCTGCATTGGTGCTAAAAGTTTC | |
| ATA-ACA | TTGGATCACATTTTTATTAGCTAAAGGTAAGTT | |
| | AACTTACCTTTAGCTAATAAAAATGTGATCCAAGAAACTTTTA | 518 |
| | GCACCAATGCAGAATTTATTTCAGTAGATATCCTATTAAACAA | |
| | ATAGAAAGCAGAAAAAAAACAGGAAAAATGTATCA | |
| | TACTGAAATAAATTCTG | 519 |
| | CAGAATTTATTTCAGTA | 520 |
| Retinoblastoma | AAAGATCTGAATCTCTAACTTTCTTTAAAAATGTACATTTTTTT | 521 |
| Gln207Term | TTCAGGGGAAGTATTACAAATGGAAGATGATCTGGTGATTTC | |
| CAA-TAA | ATTTCAGTTAATGCTATGTGTCCTTGACTATTTTA | |
| | TAAAATAGTCAAGGACACATAGCATTAACTGAAATGAAATCAC | 522 |
| | CAGATCATCTTCCATTTGTAATACTTCCCCTGAAAAAAAAATG | |
| | TACATTTTTAAAGAAAGTTAGAGATTCAGATCTTT | |
| | AAGTATTACAAATGGAA | 523 |
| | TTCCATTTGTAATACTT | 524 |
| Retinoblastoma | GTTCTTATCTAATTTACCACTTTTACAGAAACAGCTGTTATAC | 525 |
| Arg251Term | CCATTAATGGTTCACCTCGAACACCCAGGCGAGGTCAGAACA | |
| CGA to TGA | GGAGTGCACGGATAGCAAAACAACTAGAAAATGATA | |
| | TATCATTTTCTAGTTGTTTTGCTATCCGTGCACTCCTGTTCTG | 526 |
| | ACCTCGCCTGGGTGTTCGAGGTGAACCATTAATGGGTATAAC | |
| | AGCTGTTTCTGTAAAAGTGGTAAATTAGATAAGAAC | |
| | GTTCACCTCGAACACCC | 527 |
| | GGGTGTTCGAGGTGAAC | 528 |
| Retinoblastoma | TTTACCACTTTTACAGAAACAGCTGTTATACCCATTAATGGTT | 529 |
| Arg255Term | CACCTCGAACACCCAGGCGAGGTCAGAACAGGAGTGCACGG | |
| CGA to TGA | ATAGCAAAACAACTAGAAAATGATACAAGAATTATTG | |
| | CAATAATTCTTGTATCATTTTCTAGTTGTTTTGCTATCCGTGCA | 530 |
| | CTCCTGTTCTGACCTCGCCTGGGTGTTCGAGGTGAACCATTA | |
| | ATGGGTATAACAGCTGTTTCTGTAAAAGTGGTAAA | |
| | CACCCAGGCGAGGTCAG | 531 |
| | CTGACCTCGCCTGGGTG | 532 |
| Retinoblastoma | ATTAATGGTTCACCTCGAACACCCAGGCGAGGTCAGAACAG | 533 |
| Gln266Te | GAGTGCACGGATAGCAAAACAACTAGAAAATGATACAAGAAT | |
| | TATTGAAGTTCTCTGTAAAGAACATGAATGTAATATAG | |
| | CTATATTACATTCATGTTCTTTACAGAGAACTTCAATAATTCTT | 534 |
| | GTATCATTTTCTAGTTGTTTTGCTATCCGTGCACTCCTGTTCT | |
| | GACCTCGCCTGGGTGTTCGAGGTGAACCATTAAT | |
| | TAGCAAAACAACTAGAA | 535 |
| | TTCTAGTTGTTTTGCTA | 536 |
| Retinoblastoma | TGACATGTAAAGGATAATTGTCAGTGACTTTTTTCTTTCAAGG | 537 |
| Arg320Term | TTGAAAATCTTTCTAAACGATACGAAGAAATTTATCTTAAAAAT | |
| CGA to TGA | AAAGATCTAGATGCAAGATTATTTTTGGATCATG | |
| | CATGATCCAAAAATAATCTTGCATCTAGATCTTTATTTTTAAGA | 538 |
| | TAAATTTCTTCGTATCGTTTAGAAAGATTTTCAACCTTGAAAG | |
| | AAAAAAGTCACTGACAATTATCCTTTACATGTCA | |
| | TTTCTAAACGATACGAA | 539 |
| | TTCGTATCGTTTAGAAA | 540 |
| Retinoblastoma | ACAAATTGTAAATTTTCAGTATGTGAATGACTTCACTTATTGTT | 541 |
| Gln354Term | ATTTAGTTTTGAAACACAGAGAACACCACGAAAAAGTAACCTT | |
| CAG to TAG | GATGAAGAGGTGAATGTAATTCCTCCACACACTC | |
| | GAGTGTGTGGAGGAATTACATTCACCTCTTCATCAAGGTTAC | 542 |
| | TTTTTCGTGGTGTTCTCTGTGTTTCAAAACTAAATAACAATAA | |
| | GTGAAGTCATTCACATACTGAAAATTTACAATTTGT | |
| | TTGAAACACAGAGAACA | 543 |
| | TGTTCTCTGTGTTTCAA | 544 |
| Retinoblastoma | TTTTCAGTATGTGAATGACTTCACTTATTGTTATTTAGTTTTGA | 545 |
| Arg358Gly | AACACAGAGAACACCACGAAAAAGTAACCTTGATGAAGAGGT | |
| CGA to GGA | GAATGTAATTCCTCCACACACTCCAGTTAGGTATG | |
| | CATACCTAACTGGAGTGTGTGGAGGAATTACATTCACCTCTT | 546 |
| | CATCAAGGTTACTTTTTCGTGGTGTTCTCTGTGTTTCAAAACT | |
| | AAATAACAATAAGTGAAGTCATTCACATACTGAAAA | |
| | GAACACCACGAAAAAGT | 547 |
| | ACTTTTTCGTGGTGTTC | 548 |
| Retinoblastoma | TTTTCAGTATGTGAATGACTTCACTTATTGTTATTTAGTTTTGA | 549 |
| Ar | AACACAGAGAACACCACGAAAAAGTAACCTTGATGAAGAGGT | |
| | GAATGTAATTCCTCCACACACTCCAGTTAGGTATG | |
| | CATACCTAACTGGAGTGTGTGGAGGAATTACATTCACCTCTT | 550 |
| | CATCAAGGTTACTTTTTCGTGGTGTTCTCTGTGTTTCAAAACT | |
| | AAATAACAATAAGTGAAGTCATTCACATACTGAAAA | |
| | GAACACCACGAAAAAGT | 551 |
| | ACTTTTTCGTGGTGTTC | 552 |
| Retinoblastoma | CTGTTATGAACACTATCCAACAATTAATGATGATTTTAAATTCA | 553 |
| Ser397Term | GCAAGTGATCAACCTTCAGAAAATCTGATTTCCTATTTTAACG | |
| TCA to TAA | TAAGCCATATATGAAACATTATTTATTGTAATAT | |
| | ATATTACAATAAATAATGTTTCATATATGGCTTACGTTAAAATA | 554 |
| | GGAAATCAGATTTTCTGAAGGTTGATCACTTGCTGAATTTAAA | |
| | ATCATCATTAATTGTTGGATAGTGTTCATAACAG | |
| | TCAACCTTCAGAAAATC | 555 |
| | GATTTTCTGAAGGTTGA | 556 |
| Retinoblastoma | TTTCATAATTGTGATTTTCTAAAATAGCAGGCTCTTATTTTTCT | 557 |
| Arg445Term | TTTTGTTTGTTTGTAGCGATACAAACTTGGAGTTCGCTTGTAT | |
| CGA to TGA | TACCGAGTAATGGAATCCATGCTTAAATCAGTAA | |
| | TTACTGATTTAAGCATGGATTCCATTACTCGGTAATACAAGCG | 558 |
| | AACTCCAAGTTTGTATCGCTACAAACAAACAAAAAGAAAAATA | |
| | AGAGCCTGCTATTTTAGAAAATCACAATTATGAAA | |
| | GTTTGTAGCGATACAAA | 559 |
| | TTTGTATCGCTACAAAC | 560 |
| Retinoblastoma | GCTCTTATTTTTCTTTTTGTTTGTTTGTAGCGATACAAACTTGG | 561 |
| Arg455Term | AGTTCGCTTGTATTACCGAGTAATGGAATCCATGCTTAAATCA | |
| CGA to TGA | GTAAGTTAAAAACAATATAAAAAAATTTCAGCCG | |
| | CGGCTGAAATTTTTTTATATTGTTTTTAACTTACTGATTTAAGC | 562 |
| | ATGGATTCCATTACTCGGTAATACAAGCGAACTCCAAGTTTGT | |
| | ATCGCTACAAACAAACAAAAAGAAAAATAAGAGC | |
| | TGTATTACCGAGTAATG | 563 |
| | CATTACTCGGTAATACA | 564 |
| Retinoblastoma | ATCGAAAGTTTTATCAAAGCAGAAGGCAACTTGACAAGAGAA | 565 |
| Arg552Term | ATGATAAAACATTTAGAACGATGTGAACATCGAATCATGGAAT | |
| CGA to TGA | CCCTTGCATGGCTCTCAGTAAGTAGCTAAATAATTG | |
| | CAATTATTTAGCTACTTACTGAGAGCCATGCAAGGGATTCCAT | 566 |
| | GATTCGATGTTCACATCGTTCTAAATGTTTTATCATTTCTCTTG | |
| | TCAAGTTGCCTTCTGCTTTGATAAAACTTTCGAT | |
| | ATTTAGAACGATGTGAA | 567 |
| | TTCACATCGTTCTAAAT | 568 |
| Retinoblastoma | AAGTTTTATCAAAGCAGAAGGCAACTTGACAAGAGAAATGAT | 569 |
| Cys553Term | AAAACATTTAGAACGATGTGAACATCGAATCATGGAATCCCTT | |
| TGT to TGA | GCATGGCTCTCAGTAAGTAGCTAAATAATTGAAGAA | |
| | TTCTTCAATTATTTAGCTACTTACTGAGAGCCATGCAAGGGAT | 570 |
| | TCCATGATTCGATGTTCACATCGTTCTAAATGTTTTATCATTTC | |
| | TCTTGTCAAGTTGCCTTCTGCTTTGATAAAACTT | |
| | GAACGATGTGAACATCG | 571 |
| | CGATGTTCACATCGTTC | 572 |
| Retinoblastoma | AGTTTTATCAAAGCAGAAGGCAACTTGACAAGAGAAATGATA | 573 |
| Glu554Term | AAACATTTAGAACGATGTGAACATCGAATCATGGAATCCCTT | |
| GAA to TAA | GCATGGCTCTCAGTAAGTAGCTAAATAATTGAAGAAA | |
| | TTTCTTCAATTATTTAGCTACTTACTGAGAGCCATGCAAGGGA | 574 |
| | TTCCATGATTCGATGTTCACATCGTTCTAAATGTTTTATCATTT | |
| | CTCTTGTCAAGTTGCCTTCTGCTTTGATAAAACT | |
| | AACGATGTGAACATCGA | 575 |
| | TCGATGTTCACATCGTT | 576 |
| Retinoblastoma | TACCTGGGAAAATTATGCTTACTAATGTGGTTTTAATTTCATC | 577 |
| Ser567Leu | ATGTTTCATATAGGATTCACCTTTATTTGATCTTATTAAACAAT | |
| TCA to TTA | CAAAGGACCGAGAAGGACCAACTGATCACCTTGA | |
| | TCAAGGTGATCAGTTGGTCCTTCTCGGTCCTTTGATTGTTTAA | 578 |
| | TAAGATCAAATAAAGGTGAATCCTATATGAAACATGATGAAAT | |
| | TAAAACCACATTAGTAAGCATAATTTTCCCAGGTA | |
| | ATAGGATTCACCTTTAT | 579 |
| | ATAAAGGTGAATCCTAT | 580 |
| Retinoblastoma | AATGTGGTTTTAATTTCATCATGTTTCATATAGGATTCACCTTT | 581 |
| Gln575Term | ATTTGATCTTATTAAACAATCAAAGGACCGAGAAGGACCAACT | |
| CAA to TAA | GATCACCTTGAATCTGCTTGTCCTCTTAATCTTC | |
| | GAAGATTAAGAGGACAAGCAGATTCAAGGTGATCAGTTGGTC | 582 |
| | CTTCTCGGTCCTTTGATTGTTTAATAAGATCAAATAAAGGTGA | |
| | ATCCTATATGAAACATGATGAAATTAAAACCACATT | |
| | TTATTAAACAATCAAAG | 583 |
| | CTTTGATTGTTTAATAA | 584 |
| Retinoblastoma | ATTTCATCATGTTTCATATAGGATTCACCTTTATTTGATCTTAT | 585 |
| Arg579Term | TAAACAATCAAAGGACCGAGAAGGACCAACTGATCACCTTGA | |
| CGA to TGA | ATCTGCTTGTCCTCTTAATCTTCCTCTCCAGAATA | |
| | TATTCTGGAGAGGAAGATTAAGAGGACAAGCAGATTCAAGGT | 586 |
| | GATCAGTTGGTCCTTCTCGGTCCTTTGATTGTTTAATAAGATC | |
| | AAATAAAGGTGAATCCTATATGAAACATGATGAAAT | |
| | CAAAGGACCGAGAAGGA | 587 |
| | TCCTTCTCGGTCCTTTG | 588 |
| Retinoblastoma | TCATCATGTTTCATATAGGATTCACCTTTATTTGATCTTATTA | 589 |
| Glu580Term | ACAATCAAAGGACCGAGAAGGACCAACTGATCACCTTGAATC | |
| GAA to TAA | TGCTTGTCCTCTTAATCTTCCTCTCCAGAATAATC | |
| | GATTATTCTGGAGAGGAAGATTAAGAGGACAAGCAGATTCAA | 590 |
| | GGTGATCAGTTGGTCCTTCTCGGTCCTTTGATTGTTTAATAAG | |
| | ATCAAATAAAGGTGAATCCTATATGAAACATGATGA | |
| | AGGACCGAGAAGGACCA | 591 |
| | TGGTCCTTCTCGGTCCT | 592 |
| Retinoblastoma | AGAAAAAAGGTTCAACTACGCGTGTAAATTCTACTGCAAATG | 593 |
| Ser634Term | CAGAGACACAAGCAACCTCAGCCTTCCAGACCCAGAAGCCA | |
| TCA to TGA | TTGAAATCTACCTCTCTTTCACTGTTTTATAAAAAAGG | |
| | CCTTTTTTATAAAACAGTGAAAGAGAGGTAGATTTCAATGGCT | 594 |
| | TCTGGGTCTGGAAGGCTGAGGTTGCTTGTGTCTCTGCATTTG | |
| | CAGTAGAATTTACACGCGTAGTTGAACCTTTTTTCT | |
| | AGCAACCTCAGCCTTCC | 595 |
| | GGAAGGCTGAGGTTGCT | 596 |
| Retinoblastoma | AAAAAAGGTTCAACTACGCGTGTAAATTCTACTGCAAATGCA | 597 |
| Ala635P | GAGACACAAGCAACCTCAGCCTTCCAGACCCAGAAGCCATT | |
| | GAAATCTACCTCTCTTTCACTGTTTTATAAAAAAGGTT | |
| | AACCTTTTTTATAAAACAGTGAAAGAGAGGTAGATTTCAATGG | 598 |
| | CTTCTGGGTCTGGAAGGCTGAGGTTGCTTGTGTCTCTGCATT | |
| | TGCAGTAGAATTTACACGCGTAGTTGAACCTTTTTT | |
| | CAACCTCAGCCTTCCAG | 599 |
| | CTGGAAGGCTGAGGTTG | 600 |
| Retinoblastoma | ACTACGCGTGTAAATTCTACTGCAAATGCAGAGACACAAGCA | 601 |
| Gln639Term | ACCTCAGCCTTCCAGACCCAGAAGCCATTGAAATCTACCTCT | |
| CAG to TAG | CTTTCACTGTTTTATAAAAAAGGTTAGTAGATGATTA | |
| | TAATCATCTACTAACCTTTTTTATAAAACAGTGAAAGAGAGGT | 602 |
| | AGATTTCAATGGCTTCTGGGTCTGGAAGGCTGAGGTTGCTTG | |
| | TGTCTCTGCATTTGCAGTAGAATTTACACGCGTAGT | |
| | TCCAGACCCAGAAGCCA | 603 |
| | TGGCTTCTGGGTCTGGA | 604 |
| Retinoblastoma | TTGTAATTCAAAATGAACAGTAAAAATGACTAATTTTTCTTATT | 605 |
| L | CCCACAGTGTATCGGCTAGCCTATCTCCGGCTAAATACACTT | |
| | TGTGAACGCCTTCTGTCTGAGCACCCAGAATTAGA | |
| | TCTAATTCTGGGTGCTCAGACAGAAGGCGTTCACAAAGTGTA | 606 |
| | TTTAGCCGGAGATAGGCTAGCCGATACACTGTGGGAATAAG | |
| | AAAAATTAGTCATTTTTACTGTTCATTTTGAATTACAA | |
| | GTATCGGCTAGCCTATC | 607 |
| | GATAGGCTAGCCGATAC | 608 |
| Retinoblastoma | AATGAACAGTAAAAATGACTAATTTTTCTTATTCCCACAGTGT | 609 |
| Arg661Trp | ATCGGCTAGCCTATCTCCGGCTAAATACACTTTGTGAACGCC | |
| CGG to TGG | TTCTGTCTGAGCACCCAGAATTAGAACATATCATCT | |
| | AGATGATATGTTCTAATTCTGGGTGCTCAGACAGAAGGCGTT | 610 |
| | CACAAAGTGTATTTAGCCGGAGATAGGCTAGCCGATACACTG | |
| | TGGGAATAAGAAAAATTAGTCATTTTTACTGTTCATT | |
| | CCTATCTCCGGCTAAAT | 611 |
| | ATTTAGCCGGAGATAGG | 612 |
| Retinoblastoma | AACAGTAAAAATGACTAATTTTTCTTATTCCCACAGTGTATCG | 613 |
| Leu662Pro | GCTAGCCTATCTCCGGCTAAATACACTTTGTGAACGCCTTCT | |
| CTA to CCA | GTCTGAGCACCCAGAATTAGAACATATCATCTGGAC | |
| | GTCCAGATGATATGTTCTAATTCTGGGTGCTCAGACAGAAGG | 614 |
| | CGTTCACAAAGTGTATTTAGCCGGAGATAGGCTAGCCGATAC | |
| | ACTGTGGGAATAAGAAAAATTAGTCATTTTTACTGTT | |
| | TCTCCGGCTAAATACAC | 615 |
| | GTGTATTTAGCCGGAGA | 616 |
| Retinoblastoma | TATCGGCTAGCCTATCTCCGGCTAAATACACTTTGTGAACGC | 617 |
| Glu675Term | CTTCTGTCTGAGCACCCAGAATTAGAACATATCATCTGGACC | |
| GAA to TAA | CTTTTCCAGCACACCCTGCAGAATGAGTATGAACTCA | |
| | TGAGTTCATACTCATTCTGCAGGGTGTGCTGGAAAAGGGTCC | 618 |
| | AGATGATATGTTCTAATTCTGGGTGCTCAGACAGAAGGCGTT | |
| | CACAAAGTGTATTTAGCCGGAGATAGGCTAGCCGATA | |
| | AGCACCCAGAATTAGAA | 619 |
| | TTCTAATTCTGGGTGCT | 620 |
| Retinoblastoma | TTTGTGAACGCCTTCTGTCTGAGCACCCAGAATTAGAACATA | 621 |
| Gln685Pro | TCATCTGGACCCTTTTCCAGCACACCCTGCAGAATGAGTATG | |
| CAG to CCG | AACTCATGAGAGACAGGCATTTGGACCAAGTAAGAAA | |
| | TTTCTTACTTGGTCCAAATGCCTGTCTCTCATGAGTTCATACT | 622 |
| | CATTCTGCAGGGTGTGCTGGAAAAGGGTCCAGATGATATGTT | |
| | CTAATTCTGGGTGCTCAGACAGAAGGCGTTCACAAA | |
| | CCTTTTCCAGCACACCC | 623 |
| | GGGTGTGCTGGAAAAGG | 624 |
| Retinoblastoma | AAAACCATGTAATAAAATTCTGACTACTTTTACATCAATTTATT | 625 |
| Cys706Tyr | TACTAGATTATGATGTGTTCCATGTATGGCATATGCAAAGTGA | |
| TGT to TAT | AGAATATAGACCTTAAATTCAAAATCATTGTAAC | |
| | GTTACAATGATTTTGAATTTAAGGTCTATATTCTTCACTTTGCA | 626 |
| | TATGCCATACATGGAACACATCATAATCTAGTAAATAAATTGA | |
| | TGTAAAAGTAGTCAGAATTTTATTACATGGTTTT | |
| | TATGATGTGTTCCATGT | 627 |
| | ACATGGAACACATCATA | 628 |
| Retinoblastoma | TTCTGACTACTTTTACATCAATTTATTTACTAGATTATGATGTG | 629 |
| Cys712Arg | TTCCATGTATGGCATATGCAAAGTGAAGAATATAGACCTTAAA | |
| TGC to CGC | TTCAAAATCATTGTAACAGCATACAAGGATCTTC | |
| | GAAGATCCTTGTATGCTGTTACAATGATTTTGAATTTAAGGTC | 630 |
| | TATATTCTTCACTTTGCATATGCCATACATGGAACACATCATA | |
| | ATCTAGTAAATAAATTGATGTAAAAGTAGTCAGAA | |
| | ATGGCATATGCAAAGTG | 631 |
| | CACTTTGCATATGCCAT | 632 |
| Retinoblastom | GTATGGCATATGCAAAGTGAAGAATATAGACCTTAAATTCAAA | 633 |
| TAC to TAA | ATCATTGTAACAGCATACAAGGATCTTCCTCATGCTGTTCAG | |
| | GAGGTAGGTAATTTTCCATAGTAAGTTTTTTTGATA | |
| | TATCAAAAAAACTTACTATGGAAAATTACCTACCTCCTGAACA | 634 |
| | GCATGAGGAAGATCCTTGTATGCTGTTACAATGATTTTGAATT | |
| | TAAGGTCTATATTCTTCACTTTGCATATGCCATAC | |
| | ACAGCATACAAGGATCT | 635 |
| | AGATCCTTGTATGCTGT | 636 |
| Retinoblastoma | TTTTTTTTTTTTTTTACTGTTCTTCCTCAGACATTCAAACGTGT | 637 |
| Glu748Term | TTTGATCAAAGAAGAGGAGTATGATTCTATTATAGTATTCTAT | |
| GAG to TAG | AACTCGGTCTTCATGCAGAGACTGAAAACAAATA | |
| | TATTTGTTTTCAGTCTCTGCATGAAGACCGAGTTATAGAATAC | 638 |
| | TATAATAGAATCATACTCCTCTTCTTTGATCAAAACACGTTTG | |
| | AATGTCTGAGGAAGAACAGTAAAAAAAAAAAAAAA | |
| | AAGAAGAGGAGTATGAT | 639 |
| | ATCATACTCCTCTTCTT | 640 |
| Retinoblastoma | GTTTTGATCAAAGAAGAGGAGTATGATTCTATTATAGTATTCT | 641 |
| Gln762Term | ATAACTCGGTCTTCATGCAGAGACTGAAAACAAATATTTTGCA | |
| CAG to TAG | GTATGCTTCCACCAGGGTAGGTCAAAAGTATCCTT | |
| | AAGGATACTTTTGACCTACCCTGGTGGAAGCATACTGCAAAA | 642 |
| | TATTTGTTTTCAGTCTCTGCATGAAGACCGAGTTATAGAATAC | |
| | TATAATAGAATCATACTCCTCTTCTTTGATCAAAAC | |
| | TCTTCATGCAGAGACTG | 643 |
| | CAGTCTCTGCATGAAGA | 644 |
| Retinoblastoma | TAATCTACTTTTTTGTTTTTGCTCTAGCCCCCTACCTTGTCAC | 645 |
| Arg787Term | CAATACCTCACATTCCTCGAAGCCCTTACAAGTTTCCTAGTTC | |
| CGA-TGA | ACCCTTACGGATTCCTGGAGGGAACATCTATATTT | |
| | AAATATAGATGTTCCCTCCAGGAATCCGTAAGGGTGAACTAG | 646 |
| | GAAACTTGTAAGGGCTTCGAGGAATGTGAGGTATTGGTGACA | |
| | AGGTAGGGGGCTAGAGCAAAAACAAAAAAGTAGATTA | |
| | ACATTCCTCGAAGCCCT | 647 |
| | AGGGCTTCGAGGAATGT | 648 |
| Retinoblastoma | CCTTACGGATTCCTGGAGGGAACATCTATATTTCACCCCTGA | 649 |
| Ser816Term | AGAGTCCATATAAAATTTCAGAAGGTCTGCCAACACCAACAA | |
| TCA to TGA | AAATGACTCCAAGATCAAGGTGTGTGTTTTCTCTTTA | |
| | TAAAGAGAAAACACACACCTTGATCTTGGAGTCATTTTTGTTG | 650 |
| | GTGTTGGCAGACCTTCTGAAATTTTATATGGACTCTTCAGGG | |
| | GTGAAATATAGATGTTCCCTCCAGGAATCCGTAAGG | |
| | TAAAATTTCAGAAGGTC | 651 |
| | GACCTTCTGAAATTTTA | 652 |

### EXAMPLE 9

### BRCA1 and BRCA2

[0216] Breast cancer is the second major cause of cancer death in American women, with an estimated 44,190 lives lost (290 men and 43,900 women) in the US in 1997. While ovarian cancer accounts for fewer deaths than breast cancer, it still represents 4% of all female cancers. In 1994, two breast cancer susceptibility genes were identified: BRCA1 on chromosome 17 and BRCA2 on chromosome 13. When a woman carries a mutation in either BRCA1 or BRCA2, she is at increased risk of being diagnosed with breast or ovarian cancer at some point in her life.

[0217] Ford et al., Am. J. Hum. Genet. 62: 676-689 (1998) assessed the contribution of BRCA1 and BRCA2 to inherited breast cancer by linkage and mutation analysis in 237 families, each with at least 4 cases of breast cancer. Families were included without regard to the occurrence of ovarian or other cancers. Overall, disease was linked to BRCA1 in an estimated 52% of families, to BRCA2 in 32% of families, and to neither gene in 16%, suggesting other predisposition genes. The majority (81 %) of the breast-ovarian cancer families were due to BRCA1, with most others (14%) due to BRCA2. Conversely, the majority (76%) of families with both male and female breast cancer were due to BRCA2. The largest proportion (67%) of families due to other genes were families with 4 or 5 cases of female breast cancer only.

[0218] More than 75% of the reported mutations in the BRCA1 gene result in truncated proteins. Couch et al., Hum. Mutat. 8: 8-18, 1996. (1996) reported a total of 254 BRCA1 mutations, 132 (52%) of which were unique. A total of 221 (87%) of all mutations or 107 (81 %) of the unique mutations are small deletions, insertions, nonsense point mutations, splice variants, and regulatory mutations that result in truncation or absence of the BRCA1 protein. A total of 11 disease-associated missense mutations (5 unique) and 21 variants (19 unique) as yet unclassified as missense mutations or polymorphisms had been detected. Thirty-five independent benign polymorphisms had been described. The most common mutations were 185delAG and 5382insC, which accounted for 30 (11.7%) and 26 (10.1%), respectively, of all the mutations.

[0219] Most BRCA2 mutations are predicted to result in a truncated protein product. The smallest known cancer-associated deletion removes from the C terminus only 224 of the 3,418 residues constituting BRCA2, suggesting that these terminal amino acids are critical for BRCA2 function. Studies (Spain et al., Proc. Natl. Acad. Sci. 96:13920-13925 (1999)) suggest that such truncations eliminate or interfere with 2 nuclear localization signals that reside within the final 156 residues of BRCA2, suggesting that the vast majority of BRCA2 mutants are nonfunctional because they are not translocated into the nucleus.

[0220] The attached table discloses the correcting oligonucleotide base sequences for the BRACA1 and BRACA2 oligonucleotides of the invention.

TABLE 10
BRCA1 Mutations and Genome-Correcting Oligos

| | | |
|---|---|---|
| Clinical Phenotype & | | SEQ ID |
| Mutation | Correcting Oligos | NO: |

| | | |
|---|---|---|
| Breast Cancer | CTGCGCTCAGGAGGCCTTCACCCTCTGCTCTGGGTAAAGTT | 653 |
| Met-1-Ile | CATTGGAACAGAAAGAAATGGATTTATCTGCTCTTCGCGTTG | |
| ATG to ATT | AAGAAGTACAAAATGTCATTAATGCTATGCAGAAAATC | |
| | GATTTTCTGCATAGCATTAATGACATTTTGTACTTCTTCAACG | 654 |
| | CGAAGAGCAGATAAATCCATTTCTTTCTGTTCCAATGAACTTT | |
| | ACCCAGAGCAGAGGGTGAAGGCCTCCTGAGCGCAG | |
| | AAAGAAATGGATTTATC | 655 |
| | GATAAATCCATTTCTTT | 656 |
| Breast Cancer | CTGGGTAAAGTTCATTGGAACAGAAAGAAATGGATTTATCTG | 657 |
| Val-11-Ala | CTCTTCGCGTTGAAGAAGTACAAAATGTCATTAATGCTATGCA | |
| GTA to GCA | GAAAATCTTAGAGTGTCCCATCTGTCTGGAGTTGAT | |
| | ATCAACTCCAGACAGATGGGACACTCTAAGATTTTCTGCATA | 658 |
| | GCATTAATGACATTTTGTACTTCTTCAACGCGAAGAGCAGATA | |
| | AATCCATTTCTTTCTGTTCCAATGAACTTTACCCAG | |
| | TGAAGAAGTACAAAATG | 659 |
| | CATTTTGTACTTCTTCA | 660 |
| Breast Cancer | ATGGATTTATCTGCTCTTCGCGTTGAAGAAGTACAAAATGTCA | 661 |
| Ile-21-Val | TTAATGCTATGCAGAAAATCTTAGAGTGTCCCATCTGTCTGG | |
| ATC to GTC | AGTTGATCAAGGAACCTGTCTCCACAAAGTGTGACC | |
| | GGTCACACTTTGTGGAGACAGGTTCCTTGATCAACTCCAGAC | 662 |
| | AGATGGGACACTCTAAGATTTTCTGCATAGCATTAATGACATT | |
| | TTGTACTTCTTCAACGCGAAGAGCAGATAAATCCAT | |
| | TGCAGAAAATCTTAGAG | 663 |
| | CTCTAAGATTTTCTGCA | 664 |
| Breast Cancer | ATTTATCTGCTCTTCGCGTTGAAGAAGTACAAAATGTCATTAA | 665 |
| Leu-22-Ser | TGCTATGCAGAAAATCTTAGAGTGTCCCATCTGTCTGGAGTT | |
| TTA to TCA | GATCAAGGAACCTGTCTCCACAAAGTGTGACCACAT | |
| | ATGTGGTCACACTTTGTGGAGACAGGTTCCTTGATCAACTCC | 666 |
| | AGACAGATGGGACACTCTAAGATTTTCTGCATAGCATTAATG | |
| | ACATTTTGTACTTCTTCAACGCGAAGAGCAGATAAAT | |
| | GAAAATCTTAGAGTGTC | 667 |
| | GACACTCTAAGATTTTC | 668 |
| Breast Cancer | AGAAAATCTTAGAGTGTCCCATCTGTCTGGAGTTGATCAAGG | 669 |
| Cys-39-Tyr | AACCTGTCTCCACAAAGTGTGACCACATATTTTGCAAATTTTG | |
| TGT to TAT | CATGCTGAAACTTCTCAACCAGAAGAAAGGGCCTTC | |
| | GAAGGCCCTTTCTTCTGGTTGAGAAGTTTCAGCATGCAAAAT | 670 |
| | TTGCAAAATATGTGGTCACACTTTGTGGAGACAGGTTCCTTG | |
| | ATCAACTCCAGACAGATGGGACACTCTAAGATTTTCT | |
| | CACAAAGTGTGACCACA | 671 |
| | TGTGGTCACACTTTGTG | 672 |
| Breast Cancer | CACATATTTTGCAAATTTTGCATGCTGAAACTTCTCAACCAGA | 673 |
| Cys-61-Gly | AGAAAGGGCCTTCACAGTGTCCTTTATGTAAGAATGATATAA | |
| TGT to GGT | CCAAAAGGAGCCTACAAGAAAGTACGAGATTTAGTC | |
| | GACTAAATCTCGTACTTTCTTGTAGGCTCCTTTTGGTTATATC | 674 |
| | ATTCTTACATAAAGGACACTGTGAAGGCCCTTTCTTCTGGTT | |
| | GAGAAGTTTCAGCATGCAAAATTtGCAAAATATGTG | |
| | CTTCACAGTGTCCTTTA | 675 |
| | TAAAGGACACTGTGAAG | 676 |
| Breast Cancer | TTTGCAAATTTTGCATGCTGAAACTTCTCAACCAGAAGAAAGG | 677 |
| Leu-63-Stop | GCCTTCACAGTGTCCTTTATGTAAGAATGATATAACCAAAAGG | |
| TTA to TAA | AGCCTACAAGAAAGTACGAGATTTAGTCAACTTGT | |
| | ACAAGTTGACTAAATCTCGTACTTTCTTGTAGGCTCCTTTTGG | 678 |
| | TTATATCATTCTTACATAAAGGACACTGTGAAGGCCCTTTCTT | |
| | CTGGTTGAGAAGTTTCAGCATGCAAAATTTGCAAA | |
| | GTGTCCTTTATGTAAGA | 679 |
| | TCTTACATAAAGGACAC | 680 |
| Breast Cancer | TGCAAATTTTGCATGCTGAAACTTCTCAACCAGAAGAAAGGG | 681 |
| Cys-64-Arg | CCTTCACAGTGTCCTTTATGTAAGAATGATATAACCAAAAGGA | |
| TGT to CGT | GCCTACAAGAAAGTACGAGATTTAGTCAACTTGTTG | |
| Breast Cancer | CAACAAGTTGACTAAATCTCGTACTTTCTTGTAGGCTCCTTTT | 682 |
| Cys-64-Gly | GGTTATATCATTCTTACATAAAGGACACTGTGAAGGCCCTTTC | |
| TGT to GGT | TTCTGGTTGAGAAGTTTCAGCATGCAAAATTTGCA | |
| | GTCCTTTATGTAAGAAT | 683 |
| | ATTCTTACATAAAGGAC | 684 |
| Breast Cancer | GCAAATTTTGCATGCTGAAACTTCTCAACCAGAAGAAAGGGC | 685 |
| Cys-64-Tyr | CTTCACAGTGTCCTTTATGTAAGAATGATATAACCAAAAGGAG | |
| TGT to TAT | CCTACAAGAAAGTACGAGATTTAGTCAACTTGTTGA | |
| | TCAACAAGTTGACTAAATCTCGTACTTTCTTGTAGGCTCCTTT | 686 |
| | TGGTTATATCATTCTTACATAAAGGACACTGTGAAGGCCCTTT | |
| | CTTCTGGTTGAGAAGTTTCAGCATGCAAAATTTGC | |
| | TCCTTTATGTAAGAATG | 687 |
| | CATTCTTACATAAAGGA | 688 |
| Breast Cancer | CAGAAGAAAGGGCCTTCACAGTGTCCTTTATGTAAGAATGAT | 689 |
| Gln-74-Stop | ATAACCAAAAGGAGCCTACAAGAAAGTACGAGATTTAGTCAA | |
| CAA to TAA | CTTGTTGAAGAGCTATTGAAAATCATTTGTGCTTTTC | |
| | GAAAAGCACAAATGATTTTCAATAGCTCTTCAACAAGTTGACT | 690 |
| | AAATCTCGTACTTTCTTGTAGGCTCCTTTTGGTTATATCATTCT | |
| | TACATAAAGGACACTGTGAAGGCCCTTTCTTCTG | |
| | GGAGCCTACAAGAAAGT | 691 |
| | ACTTTCTTGTAGGCTCC | 692 |
| Breast Cancer | AGCTATTGAAAATCATTTGTGCTTTTCAGCTTGACACAGGTTT | 693 |
| Tyr-105-Cys | GGAGTATGCAAACAGCTATAATTTTGCAAAAAAGGAAAATAA | |
| TAT to TGT | CTCTCCTGAACATCTAAAAGATGAAGTTTCTATCAT | |
| | ATGATAGAAACTTCATCTTTTAGATGTTCAGGAGAGTTATTTT | 694 |
| | CCTTTTTTGCAAAATTATAGCTGTTTGCATACTCCAAACCTGT | |
| | GTCAAGCTGAAAAGCACAAATGATTTTCAATAGCT | |
| | AAACAGCTATAATTTTG | 695 |
| | CAAAATTATAGCTGTTT | 696 |
| Breast Cancer | CTACAGAGTGAACCCGAAAATCCTTCCTTGCAGGAAACCAGT | 697 |
| Asn-158-Tyr | CTCAGTGTCCAACTCTCTAACCTTGGAACTGTGAGAACTCTG | |
| AAC to TAC | AGGACAAAGCAGCGGATACAACCTCAAAAGACGTCTG | |
| | CAGACGTCTTTTGAGGTTGTATCCGCTGCTTTGTCCTCAGAG | 698 |
| | TTCTCACAGTTCCAAGGTTAGAGAGTTGGACACTGAGACTGG | |
| | TTTCCTGCAAGGAAGGATTTTCGGGTTCACTCTGTAG | |
| | AACTCTCTAACCTTGGA | 699 |
| | TCCAAGGTTAGAGAGTT | 700 |
| Breast Cancer | GAAACCAGTCTCAGTGTCCAACTCTCTAACCTTGGAACTGTG | 701 |
| Gln-169-Stop | AGAACTCTGAGGACAAAGCAGCGGATACAACCTCAAAAGAC | |
| CAG to TAG | GTCTGTCTACATTGAATTGGGATCTGATTCTTCTGAAG | |
| | CTTCAGAAGAATCAGATCCCAATTCAATGTAGACAGACGTCT | 702 |
| | TTTGAGGTTGTATCCGCTGCTTTGTCCTCAGAGTTCTCACAG | |
| | TTCCAAGGTTAGAGAGTTGGACACTGAGACTGGTTTC | |
| | GGACAAAGCAGCGGATA | 703 |
| | TATCCGCTGCTTTGTCC | 704 |
| Breast Cancer | CTCCCAGCACAGAAAAAAAGGTAGATCTGAATGCTGATCCCC | 705 |
| Trp-353-Stop | TGTGTGAGAGAAAAGAATGGAATAAGCAGAAACTGCCATGCT | |
| TGG to TAG | CAGAGAATCCTAGAGATACTGAAGATGTTCCTTGGAT | |
| | ATCCAAGGAACATCTTCAGTATCTCTAGGATTCTCTGAGCAT | 706 |
| | GGCAGTTTCTGCTTATTCCATTCTTTTCTCTCACACAGGGGAT | |
| | CAGCATTCAGATCTACCTTTTTTTCTGTGCTGGGAG | |
| | AAAAGAATGGAATAAGC | 707 |
| | GCTTATTCCATTCTTTT | 708 |
| Breast Cancer | ATGCTCAGAGAATCCTAGAGATACTGAAGATGTTCCTTGGAT | 709 |
| Ile-379-Met | AACACTAAATAGCAGCATTCAGAAAGTTAATGAGTGGTTTTCC | |
| ATT to ATG | AGAAGTGATGAACTGTTAGGTTCTGATGACTCACAT | |
| | ATGTGAGTCATCAGAACCTAACAGTTCATCACTTCTGGAAAA | 710 |
| | CCACTCATTAACTTTCTGAATGCTGCTATTTAGTGTTATCCAA | |
| | GGAACATCTTCAGTATCTCTAGGATTCTCTGAGCAT | |
| | AGCAGCATTCAGAAAGT | 711 |
| | ACTTTCTGAATGCTGCT | 712 |
| Breast Cancer | GGGAGTCTGAATCAAATGCCAAAGTAGCTGATGTATTGGACG | 713 |
| Glu-421-Gly | TTCTAAATGAGGTAGATGAATATTCTGGTTCTTCAGAGAAAAT | |
| GAA to GGA | AGACTTACTGGCCAGTGATCCTCATGAGGCTTTAAT | |
| | ATTAAAGCCTCATGAGGATCACTGGCCAGTAAGTCTATTTTCT | 714 |
| | CTGAAGAACCAGAATATTCATCTACCTCATTTAGAACGTCCAA | |
| | TACATCAGCTACTTTGGCATTTGATTCAGACTCCC | |
| | GGTAGATGAATATTCTG | 715 |
| | CAGAATATTCATCTACC | 716 |
| Breast Cancer | ATATGTAAAAGTGAAAGAGTTCACTCCAAATCAGTAGAGAGT | 717 |
| Phe-461-Leu | AATATTGAAGACAAAATATTTGGGAAAACCTATCGGAAGAAG | |
| TTT to CTT | GCAAGCCTCCCCAACTTAAGCCATGTAACTGAAAATC | |
| | GATTTTCAGTTACATGGCTTAAGTTGGGGAGGCTTGCCTTCT | 718 |
| | TCCGATAGGTTTTCCCAAATATTTTGTCTTCAATATTACTCTCT | |
| | ACTGATTTGGAGTGAACTCTTTCACTTTTACATAT | |
| | ACAAAATATTTGGGAAA | 719 |
| | TTTCCCAAATATTTTGT | 720 |
| Breast Cancer | GAAAGAGTTCACTCCAAATCAGTAGAGAGTAATATTGAAGAC | 721 |
| Tyr-465-Leu | AAAATATTTGGGAAAACCTATCGGAAGAAGGCAAGCCTCCCC | |
| TAT to GAT | AACTTAAGCCATGTAACTGAAAATCTAATTATAGGAG | |
| | CTCCTATAATTAGATTTTCAGTTACATGGCTTAAGTTGGGGAG | 722 |
| | GCTTGCCTTCTTCCGATAGGTTTTCCCAAATATTTTGTCTTCA | |
| | ATATTACTCTCTACTGATTTGGAGTGAACTCTTTC | |
| | GGAAAACCTATCGGAAG | 723 |
| | CTTCCGATAGGTTTTCC | 724 |
| Breast Cancer | ACCTATCGGAAGAAGGCAAGCCTCCCCAACTTAAGCCATGTA | 725 |
| Gly-484-Stop | ACTGAAAATCTAATTATAGGAGCATTTGTTACTGAGCCACAGA | |
| GGA to TGA | TAATACAAGAGCGTCCCCTCACAAATAAATTAAAGC | |
| | GCTTTAATTTATTTGTGAGGGGACGCTCTTGTATTATCTGTGG | 726 |
| | CTCAGTAACAAATGCTCCTATAATTAGATTTTCAGTTACATGG | |
| | CTTAAGTTGGGGAGGCTTGCCTTCTTCCGATAGGT | |
| | TAATTATAGGAGCATTT | 727 |
| | AAATGCTCCTATAATTA | 728 |
| Breast Cancer | TTACTGAGCCACAGATAATACAAGAGCGTCCCCTCACAAATA | 729 |
| Arg-507-Ile | AATTAAAGCGTAAAAGGAGACCTACATCAGGCCTTCATCCTG | |
| AGA to ATA | AGGATTTTATCAAGAAAGCAGATTTGGCAGTTCAAAA | |
| | TTTTGAACTGCCAAATCTGCTTTCTTGATAAAATCCTCAGGAT | 730 |
| | GAAGGCCTGATGTAGGTCTCCTTTTACGCTTTAATTTATTTGT | |
| | GAGGGGACGCTCTTGTATTATCTGTGGCTCAGTAA | |
| | TAAAAGGAGACCTACAT | 731 |
| | ATGTAGGTCTCCTTTTA | 732 |
| Breast Cancer | CACAGATAATACAAGAGCGTCCCCTCACAAATAAATTAAAGC | 733 |
| Ser-510-Stop | GTAAAAGGAGACCTACATCAGGCCTTCATCCTGAGGATTTTA | |
| TCA to TGA | TCAAGAAAGCAGATTTGGCAGTTCAAAAGACTCCTGA | |
| | TCAGGAGTCTTTTGAACTGCCAAATCTGCTTTCTTGATAAAAT | 734 |
| | CCTCAGGATGAAGGCCTGATGTAGGTCTCCTTTTACGCTTTA | |
| | ATTTATTTGTGAGGGGACGCTCTTGTATTATCTGTG | |
| | ACCTACATCAGGCCTTC | 735 |
| | GAAGGCCTGATGTAGGT | 736 |
| Breast Cancer | AGGAGACCTACATCAGGCCTTCATCCTGAGGATTTTATCAAG | 737 |
| Gln-526-Stop | AAAGCAGATTTGGCAGTTCAAAAGACTCCTGAAATGATAAAT | |
| CAA to TAA | CAGGGAACTAACCAAACGGAGCAGAATGGTCAAGTGA | |
| | TCACTTGACCATTCTGCTCCGTTTGGTTAGTTCCCTGATTTAT | 738 |
| | CATTTCAGGAGTCTTTTGAACTGCCAAATCTGCTTTCTTGATA | |
| | AAATCCTCAGGATGAAGGCCTGATGTAGGTCTCCT | |
| | TGGCAGTTCAAAAGACT | 739 |
| | AGTCTTTTGAACTGCCA | 740 |
| Breast Cancer | AGGAGACCTACATCAGGCCTTCATCCTGAGGATTTTATCAAG | 741 |
| Gln-541-Stop | AAAGCAGATTTGGCAGTTCAAAAGACTCCTGAAATGATAAAT | |
| CAG to TAG | CAGGGAACTAACCAAACGGAGCAGAATGGTCAAGTGA | |
| | TCACTTGACCATTCTGCTCCGTTTGGTTAGTTCCCTGATTTAT | 742 |
| | CATTTCAGGAGTCTTTTGAACTGCCAAATCTGCTTTCTTGATA | |
| | AAATCCTCAGGATGAAGGCCTGATGTAGGTCTCCT | |
| | AAACGGAGCAGAATGGT | 743 |
| | ACCATTCTGCTCCGTTT | 744 |
| Breast Cancer | TAAATCAGGGAACTAACCAAACGGAGCAGAATGGTCAAGTGA | 745 |
| Gly-552-Val | TGAATATTACTAATAGTGGTCATGAGAATAAAACAAAAGGTGA | |
| GGT to GTT | TTCTATTCAGAATGAGAAAAATCCTAACCCAATAGA | |
| | TCTATTGGGTTAGGATTTTTCTCATTCTGAATAGAATCACCTT | 746 |
| | TTGTTTTATTCTCATGACCACTATTAGTAATATTCATCACTTGA | |
| | CCATTCTGCTCCGTTTGGTTAGTTCCCTGATTTA | |
| | TAATAGTGGTCATGAGA | 747 |
| | TCTCATGACCACTATTA | 748 |
| Breast Cancer | GGTCAAGTGATGAATATTACTAATAGTGGTCATGAGAATAAAA | 749 |
| Gln-563-Stop | CAAAAGGTGATTCTATTCAGAATGAGAAAAATCCTAACCCAAT | |
| CAG to TAG | AGAATCACTCGAAAAAGAATCTGCTTTCAAAACGA | |
| | TCGTTTTGAAAGCAGATTCTTTTTCGAGTGATTCTATTGGGTT | 750 |
| | AGGATTTTTCTCATTCTGAATAGAATCACCTTTTGTTTTATTCT | |
| | CATGACCACTATTAGTAATATTCATCACTTGACC | |
| | ATTCTATTCAGAATGAG | 751 |
| | CTCATTCTGAATAGAAT | 752 |
| Ovarian Cancer | ATAAGCAGCAGTATAAGCAATATGGAACTCGAATTAAATATCC | 753 |
| Lys-607-Stop | ACAATTCAAAAGCACCTAAAAAGAATAGGCTGAGGAGGAAGT | |
| AAA to TAA | CTTCTACCAGGCATATTCATGCGCTTGAACTAGTAG | |
| | CTACTAGTTCAAGCGCATGAATATGCCTGGTAGAAGACTTCC | 754 |
| | TCCTCAGCCTATTCTTTTTAGGTGCTTTTGAATTGTGGATATT | |
| | TAATTCGAGTTCCATATTGCTTATACTGCTGCTTAT | |
| | AAGCACCTAAAAAGAAT | 755 |
| | ATTCTTTTTAGGTGCTT | 756 |
| Breast Cancer | ATATTCATGCGCTTGAACTAGTAGTCAGTAGAAATCTAAGCC | 757 |
| Leu-639-Stop | CACCTAATTGTACTGAATTGCAAATTGATAGTTGTTCTAGCAG | |
| TTG to TAG | TGAAGAGATAAAGAAAAAAAAGTACAACCAAATGCC | |
| | GGCATTTGGTTGTACTTTTTTTTCTTTATCTCTTCACTGCTAGA | 758 |
| | ACAACTATCAATTTGCAATTCAGTACAATTAGGTGGGCTTAGA | |
| | TTTCTACTGACTACTAGTTCAAGCGCATGAATAT | |
| | TACTGAATTGCAAATTG | 759 |
| | CAATTTGCAATTCAGTA | 760 |
| Breast Cancer | GAACCTGCAACTGGAGCCAAGAAGAGTAACAAGCCAAATGA | 761 |
| Asp-693-Asn | ACAGACAAGTAAAAGACATGACAGCGATACTTTCCCAGAGCT | |
| GAC to AAC | GAAGTTAACAAATGCACCTGGTTCTTTTACTAAGTGTT | |
| | AACACTTAGTAAAAGAACCAGGTGCATTTGTTAACTTCAGCTC | 762 |
| | TGGGAAAGTATCGCTGTCATGTCTTTTACTTGTCTGTTCATTT | |
| | GGCTTGTTACTCTTCTTGGCTCCAGTTGCAGGTTC | |
| | AAAGACATGACAGCGAT | 763 |
| | ATCGCTGTCATGTCTTT | 764 |
| Ovarian Cancer | CTGAAGTTAACAAATGCACCTGGTTCTTTTACTAAGTGTTCAA | 765 |
| Glu-720-Stop | ATACCAGTGAACTTAAAGAATTTGTCAATCCTAGCCTTCCAAG | |
| GAA to TAA | AGAAGAAAAAGAAGAGAAACTAGAAACAGTTAAAG | |
| | CTTTAACTGTTTCTAGTTTCTCTTCTTTTTCTTCTCTTGGAAGG | 766 |
| | CTAGGATTGACAAATTCTTTAAGTTCACTGGTATTTGAACACT | |
| | TAGTAAAAGAACCAGGTGCATTTGTTAACTTCAG | |
| | AACTTAAAGAATTTGTC | 767 |
| | GACAAATTCTTTAAGTT | 768 |
| Breast Cancer | CTAGAAACAGTTAAAGTGTCTAATAATGCTGAAGACCCCAAA | 769 |
| Glu-755-Stop | GATCTCATGTTAAGTGGAGAAAGGGTTTTGCAAACTGAAAGA | |
| GAA to TAA | TCTGTAGAGAGTAGCAGTATTTCATTGGTACCTGGTA | |
| | TACCAGGTACCAATGAAATACTGCTACTCTCTACAGATCTTTC | 770 |
| | AGTTTGCAAAACCCTTTCTCCACTTAACATGAGATCTTTGGGG | |
| | TCTTCAGCATTATTAGACACTTTAACTGTTTCTAG | |
| | TAAGTGGAGAAAGGGTT | 771 |
| | AACCCTTTCTCCACTTA | 772 |
| Breast Cancer | TCATGTTAAGTGGAGAAAGGGTTTTGCAAACTGAAAGATCTG | 773 |
| Ser-770-Stop | TAGAGAGTAGCAGTATTTCATTGGTACCTGGTACTGATTATG | |
| TCA to TAA | GCACTCAGGAAAGTATCTCGTTACTGGAAGTTAGCAC | |
| | GTGCTAACTTCCAGTAACGAGATACTTTCCTGAGTGCCATAA | 774 |
| | TCAGTACCAGGTACCAATGAAATACTGCTACTCTCTACAGAT | |
| | CTTTCAGTTTGCAAAACCCTTTCTCCACTTAACATGA | |
| | CAGTATTTCATTGGTAC | 775 |
| | GTACCAATGAAATACTG | 776 |
| Breast Cancer | TAAGTGGAGAAAGGGTTTTGCAAACTGAAAGATCTGTAGAGA | 777 |
| Val-772-Ala | GTAGCAGTATTTCATTGGTACCTGGTACTGATTATGGCACTC | |
| GTA to GCA | AGGAAAGTATCTCGTTACTGGAAGTTAGCACTCTAGG | |
| | CCTAGAGTGCTAACTTCCAGTAACGAGATACTTTCCTGAGTG | 778 |
| | CCATAATCAGTACCAGGTACCAATGAAATACTGCTACTCTCTA | |
| | CAGATCTTTCAGTTTGCAAAACCCTTTCTCCACTTA | |
| | TTCATTGGTACCTGGTA | 779 |
| | TACCAGGTACCAATGAA | 780 |
| Breast Cancer | ACTGAAAGATCTGTAGAGAGTAGCAGTATTTCATTGGTACCT | 781 |
| Gln-780-Stop | GGTACTGATTATGGCACTCAGGAAAGTATCTCGTTACTGGAA | |
| CAG to TAG | GTTAGCACTCTAGGGAAGGCAAAAACAGAACCAAATA | |
| | TATTTGGTTCTGTTTTTGCCTTCCCTAGAGTGCTAACTTCCAG | 782 |
| | TAACGAGATACTTTCCTGAGTGCCATAATCAGTACCAGGTAC | |
| | CAATGAAATACTGCTACTCTCTACAGATCTTTCAGT | |
| | ATGGCACTCAGGAAAGT | 783 |
| | ACTTTCCTGAGTGCCAT | 784 |
| Breast Cancer | TATGGCACTCAGGAAAGTATCTCGTTACTGGAAGTTAGCACT | 785 |
| Glu-797-Stop | CTAGGGAAGGCAAAAACAGAACCAAATAAATGTGTGAGTCAG | |
| GAA to TAA | TGTGCAGCATTTGAAAACCCCAAGGGACTAATTCATG | |
| | CATGAATTAGTCCCTTGGGGTTTTCAAATGCTGCACACTGAC | 786 |
| | TCACACATTTATTTGGTTCTGTTTTTGCCTTCCCTAGAGTGCT | |
| | AACTTCCAGTAACGAGATACTTTCCTGAGTGCCATA | |
| | CAAAAACAGAACCAAAT | 787 |
| | ATTTGGTTCTGTTTTTG | 788 |
| Breast Cancer | AAATGTGTGAGTCAGTGTGCAGCATTTGAAAACCCCAAGGGA | 789 |
| Lys-820-Glu | CTAATTCATGGTTGTTCCAAAGATAATAGAAATGACACAGAAG | |
| AAA to GAA | GCTTTAAGTATCCATTGGGACATGAAGTTAACCACA | |
| | TGTGGTTAACTTCATGTCCCAATGGATACTTAAAGCCTTCTGT | 790 |
| | GTCATTTCTATTATCTTTGGAACAACCATGAATTAGTCCCTTG | |
| | GGGTTTTCAAATGCTGCACACTGACTCACACATTT | |
| | GTTGTTCCAAAGATAAT | 791 |
| | ATTATCTTTGGAACAAC | 792 |
| Breast Cancer | CAGCATTTGAAAACCCCAAGGGACTAATTCATGGTTGTTCCA | 793 |
| Thr-826-Lys | AAGATAATAGAAATGACACAGAAGGCTTTAAGTATCCATTGG | |
| ACA to AAA | GACATGAAGTTAACCACAGTCGGGAAACAAGCATAGA | |
| | TCTATGCTTGTTTCCCGACTGTGGTTAACTTCATGTCCCAATG | 794 |
| | GATACTTAAAGCCTTCTGTGTCATTTCTATTATCTTTGGAACA | |
| | ACCATGAATTAGTCCCTTGGGGTTTTCAAATGCTG | |
| | AAATGACACAGAAGGCT | 795 |
| | AGCCTTCTGTGTCATTT | 796 |
| Breast Cancer | GATAATAGAAATGACACAGAAGGCTTTAAGTATCCATTGGGA | 797 |
| Arg-841-Trp | CATGAAGTTAACCACAGTCGGGAAACAAGCATAGAAATGGAA | |
| CGG to TGG | GAAAGTGAACTTGATGCTCAGTATTTGCAGAATACAT | |
| | ATGTATTCTGCAAATACTGAGCATCAAGTTCACTTTCTTCCAT | 798 |
| | TTCTATGCTTGTTTCCCGACTGTGGTTAACTTCATGTCCCAAT | |
| | GGATACTTAAAGCCTTCTGTGTCATTTCTATTATC | |
| | ACCACAGTCGGGAAACA | 799 |
| | TGTTTCCCGACTGTGGT | 800 |
| Breast Cancer | AACTTGATGCTCAGTATTTGCAGAATACATTCAAGGTTTCAAA | 801 |
| Pro-871-Leu | GCGCCAGTCATTTGCTCCGTTTTCAAATCCAGGAAATGCAGA | |
| CCG to CTG | AGAGGAATGTGCAACATTCTCTGCCCACTCTGGGTC | |
| | GACCCAGAGTGGGCAGAGAATGTTGCACATTCCTCTTCTGCA | 802 |
| | TTTCCTGGATTTGAAAACGGAGCAAATGACTGGCGCTTTGAA | |
| | ACCTTGAATGTATTCTGCAAATACTGAGCATCAAGTT | |
| | ATTTGCTCCGTTTTCAA | 803 |
| | TTGAAAACGGAGCAAAT | 804 |
| Breast Cancer | TTTCAAATCCAGGAAATGCAGAAGAGGAATGTGCAACATTCT | 805 |
| Leu-892-Ser | CTGCCCACTCTGGGTCCTTAAAGAAACAAAGTCCAAAAGTCA | |
| TTA to TCA | CTTTTGAATGTGAACAAAAGGAAGAAAATCAAGGAAA | |
| | TTTCCTTGATTTTCTTCCTTTTGTTCACATTCAAAAGTGACTTT | 806 |
| | TGGACTTTGTTTCTTTAAGGACCCAGAGTGGGCAGAGAATGT | |
| | TGCACATTCCTCTTCTGCATTTCCTGGATTTGAAA | |
| | TGGGTCCTTAAAGAAAC | 807 |
| | GTTTCTTTAAGGACCCA | 808 |
| Breast Cancer | CACTCTGGGTCCTTAAAGAAACAAAGTCCAAAAGTCACTTTT | 809 |
| Glu-908-Stop | GAATGTGAACAAAAGGAAGAAAATCAAGGAAAGAATGAGTCT | |
| GAA to TAA | AATATCAAGCCTGTACAGACAGTTAATATCACTGCAG | |
| | CTGCAGTGATATTAACTGTCTGTACAGGCTTGATATTAGACTC | 810 |
| | ATTCTTTCCTTGATTTTCTTCCTTTTGTTCACATTCAAAAGTGA | |
| | CTTTTGGACTTTGTTTCTTTAAGGACCCAGAGTG | |
| | AAAAGGAAGAAAATCAA | 811 |
| | TTGATTTTCTTCCTTTT | 812 |
| Breast Cancer | ATAATGCCAAATGTAGTATCAAAGGAGGCTCTAGGTTTTGTCT | 813 |
| Gly-960-Asp | ATCATCTCAGTTCAGAGGCAACGAAACTGGACTCATTACTCC | |
| GGC to GAC | AAATAAACATGGACTTTTACAAAACCCATATCGTAT | |
| | ATACGATATGGGTTTTGTAAAAGTCCATGTTTATTTGGAGTAA | 814 |
| | TGAGTCCAGTTTCGTTGCCTCTGAACTGAGATGATAGACAAA | |
| | ACCTAGAGCCTCCTTTGATACTACATTTGGCATTAT | |
| | GTTCAGAGGCAACGAAA | 815 |
| | TTTCGTTGCCTCTGAAC | 816 |
| Breast Cancer | ATTTGTTAAAACTAAATGTAAGAAAAATCTGCTAGAGGAAAAC | 817 |
| Met-1008-Ile | TTTGAGGAACATTCAATGTCACCTGAAAGAGAAATGGGAAAT | |
| ATG to ATA | GAGAACATTCCAAGTACAGTGAGCACAATTAGCCGT | |
| | ACGGCTAATTGTGCTCACTGTACTTGGAATGTTCTCATTTCCC | 818 |
| | ATTTCTCTTTCAGGTGACATTGAATGTTCCTCAAAGTTTTCCT | |
| | CTAGCAGATTTTTCTTACATTTAGTTTTAACAAAT | |
| | CATTCAATGTCACCTGA | 819 |
| | TCAGGTGACATTGAATG | 820 |
| Breast Cancer | ACTTTGAGGAACATTCAATGTCACCTGAAAGAGAAATGGGAA | 821 |
| Thr-1025-Ile | ATGAGAACATTCCAAGTACAGTGAGCACAATTAGCCGTAATA | |
| ACA to ATA | ACATTAGAGAAAATGTTTTTAAAGAAGCCAGCTCAAG | |
| | CTTGAGCTGGCTTCTTTAAAAACATTTTCTCTAATGTTATTAC | 822 |
| | GGCTAATTGTGCTCACTGTACTTGGAATGTTCTCATTTCCCAT | |
| | TTCTCTTTCAGGTGACATTGAATGTTCCTCAAAGT | |
| | TCCAAGTACAGTGAGCA | 823 |
| | TGCTCACTGTACTTGGA | 824 |
| Breast Cancer | ACATTCCAAGTACAGTGAGCACAATTAGCCGTAATAACATTA | 825 |
| Glu-1038-Gly | GAGAAAATGTTTTTAAAGAAGCCAGCTCAAGCAATATTAATGA | |
| GAA to GGA | AGTAGGTTCCAGTACTAATGAAGTGGGCTCCAGTAT | |
| | ATACTGGAGCCCACTTCATTAGTACTGGAACCTACTTCATTAA | 826 |
| | TATTGCTTGAGCTGGCTTCTTTAAAAACATTTTCTCTAATGTTA | |
| | TTACGGCTAATTGTGCTCACTGTACTTGGAATGT | |
| | TTTTAAAGAAGCCAGCT | 827 |
| | AGCTGGCTTCTTTAAAA | 828 |
| Breast Cancer | CAAGTACAGTGAGCACAATTAGCCGTAATAACATTAGAGAAA | 829 |
| Ser-1040-Asn | ATGTTTTTAAAGAAGCCAGCTCAAGCAATATTAATGAAGTAGG | |
| AGC to AAC | TTCCAGTACTAATGAAGTGGGCTCCAGTATTAATGA | |
| | TCATTAATACTGGAGCCCACTTCATTAGTACTGGAACCTACTT | 830 |
| | CATTAATATTGCTTGAGCTGGCTTCTTTAAAAACATTTTCTCTA | |
| | ATGTTATTACGGCTAATTGTGCTCACTGTACTTG | |
| | AGAAGCCAGCTCAAGCA | 831 |
| | TGCTTGAGCTGGCTTCT | 832 |
| Breast Cancer | GCCGTAATAACATTAGAGAAAATGTTTTTAAAGAAGCCAGCTC | 833 |
| Val-1047-Ala | AAGCAATATTAATGAAGTAGGTTCCAGTACTAATGAAGTGGG | |
| GTA to GCA | CTCCAGTATTAATGAAATAGGTTCCAGTGATGAAAA | |
| | TTTTCATCACTGGAACCTATTTCATTAATACTGGAGCCCACTT | 834 |
| | CATTAGTACTGGAACCTACTTCATTAATATTGCTTGAGCTGGC | |
| | TTCTTTAAAAACATTTTCTCTAATGTTATTACGGC | |
| | TAATGAAGTAGGTTCCA | 835 |
| | TGGAACCTACTTCATTA | 836 |
| Breast Cancer | AAATAGGTTCCAGTGATGAAAACATTCAAGCAGAACTAGGTA | 837 |
| Leu-1080-Stop | GAAACAGAGGGCCAAAATTGAATGCTATGCTTAGATTAGGGG | |
| TTG to TAG | TTTTGCAACCTGAGGTCTATAAACAAAGTCTTCCTGG | |
| | CCAGGAAGACTTTGTTTATAGACCTCAGGTTGCAAAACCCCT | 838 |
| | AATCTAAGCATAGCATTCAATTTTGGCCCTCTGTTTCTACCTA | |
| | GTTCTGCTTGAATGTTTTCATCACTGGAACCTATTT | |
| | GCCAAAATTGAATGCTA | 839 |
| | TAGCATTCAATTTTGGC | 840 |
| Breast Cancer | AAAACATTCAAGCAGAACTAGGTAGAAACAGAGGGCCAAAAT | 841 |
| Leu-1086-Stop | TGAATGCTATGCTTAGATTAGGGGTTTTGCAACCTGAGGTCT | |
| TTA to TGA | ATAAACAAAGTCTTCCTGGAAGTAATTGTAAGCATCC | |
| | GGATGCTTACAATTACTTCCAGGAAGACTTTGTTTATAGACCT | 842 |
| | CAGGTTGCAAAACCCCTAATCTAAGCATAGCATTCAATTTTG | |
| | GCCCTCTGTTTCTACCTAGTTCTGCTTGAATGTTTT | |
| | GCTTAGATTAGGGGTTT | 843 |
| | AAACCCCTAATCTAAGC | 844 |
| Breast Cancer | AGCAAGAATATGAAGAAGTAGTTCAGACTGTTAATACAGATTT | 845 |
| Ser-1130-Stop | CTCTCCATATCTGATTTCAGATAACTTAGAACAGCCTATGGGA | |
| TCA to TGA | AGTAGTCATGCATCTCAGGTTTGTTCTGAGACACC | |
| | GGTGTCTCAGAACAAACCTGAGATGCATGACTACTTCCCATA | 846 |
| | GGCTGTTCTAAGTTATCTGAAATCAGATATGGAGAGAAATCT | |
| | GTATTAACAGTCTGAACTACTTCTTCATATTCTTGCT | |
| | TCTGATTTCAGATAACT | 847 |
| | AGTTATCTGAAATCAGA | 848 |
| Breast Cancer | CTAGTTTTGCTGAAAATGACATTAAGGAAAGTTCTGCTGTTTT | 849 |
| Lys-1183-Arg | TAGCAAAAGCGTCCAGAAAGGAGAGCTTAGCAGGAGTCCTA | |
| AAA to AGA | GCCCTTTCACCCATACACATTTGGCTCAGGGTTACCG | |
| | CGGTAACCCTGAGCCAAATGTGTATGGGTGAAAGGGCTAGG | 850 |
| | ACTCCTGCTAAGCTCTCCTTTCTGGACGCTTTTGCTAAAAACA | |
| | GCAGAACTTTCCTTAATGTCATTTTCAGCAAAACTAG | |
| | CGTCCAGAAAGGAGAGC | 851 |
| | GCTCTCCTTTCTGGACG | 852 |
| Breast Cancer | AGCGTCCAGAAAGGAGAGCTTAGCAGGAGTCCTAGCCCTTT | 853 |
| Gln-1200-Stop | CACCCATACACATTTGGCTCAGGGTTACCGAAGAGGGGCCA | |
| CAG to TAG | AGAAATTAGAGTCCTCAGAAGAGAACTTATCTAGTGAGG | |
| | CCTCACTAGATAAGTTCTCTTCTGAGGACTCTAATTTCTTGGC | 854 |
| | CCCTCTTCGGTAACCCTGAGCCAAATGTGTATGGGTGAAAGG | |
| | GCTAGGACTCCTGCTAAGCTCTCCTTTCTGGACGCT | |
| | ATTTGGCTCAGGGTTAC | 855 |
| | GTAACCCTGAGCCAAAT | 856 |
| Breast Cancer | AAAGGAGAGCTTAGCAGGAGTCCTAGCCCTTTCACCCATACA | 857 |
| Arg-1203-Stop | CATTTGGCTCAGGGTTACCGAAGAGGGGCCAAGAAATTAGA | |
| CGA to TGA | GTCCTCAGAAGAGAACTTATCTAGTGAGGATGAAGAGC | |
| | GCTCTTCATCCTCACTAGATAAGTTCTCTTCTGAGGACTCTAA | 858 |
| | TTTCTTGGCCCCTCTTCGGTAACCCTGAGCCAAATGTGTATG | |
| | GGTGAAAGGGCTAGGACTCCTGCTAAGCTCTCCTTT | |
| | AGGGTTACCGAAGAGGG | 859 |
| | CCCTCTTCGGTAACCCT | 860 |
| Breast Cancer | ACCCATACACATTTGGCTCAGGGTTACCGAAGAGGGGCCAA | 861 |
| Glu-1214-Stop | GAAATTAGAGTCCTCAGAAGAGAACTTATCTAGTGAGGATGA | |
| GAG to TAG | AGAGCTTCCCTGCTTCCAACACTTGTTATTTGGTAAAG | |
| | CTTTACCAAATAACAAGTGTTGGAAGCAGGGAAGCTCTTCAT | 862 |
| | CCTCACTAGATAAGTTCTCTTCTGAGGACTCTAATTTCTTGGC | |
| | CCCTCTTCGGTAACCCTGAGCCAAATGTGTATGGGT | |
| | CCTCAGAAGAGAACTTA | 863 |
| | TAAGTTCTCTTCTGAGG | 864 |
| Breast Cancer | TCAGGGTTACCGAAGAGGGGCCAAGAAATTAGAGTCCTCAG | 865 |
| Glu-1219-Asp | AAGAGAACTTATCTAGTGAGGATGAAGAGCTTCCCTGCTTCC | |
| GAG to GAC | AACACTTGTTATTTGGTAAAGTAAACAATATACCTTCT | |
| | AGAAGGTATATTGTTTACTTTACCAAATAACAAGTGTTGGAAG | 866 |
| | CAGGGAAGCTCTTCATCCTCACTAGATAAGTTCTCTTCTGAG | |
| | GACTCTAATTTCTTGGCCCCTCTTCGGTAACCCTGA | |
| | TCTAGTGAGGATGAAGA | 867 |
| | TCTTCATCCTCACTAGA | 868 |
| Breast Cancer | GGTTACCGAAGAGGGGCCAAGAAATTAGAGTCCTCAGAAGA | 869 |
| Glu-1221-Stop | GAACTTATCTAGTGAGGATGAAGAGCTTCCCTGCTTCCAACA | |
| GAA to TAA | CTTGTTATTTGGTAAAGTAAACAATATACCTTCTCAGT | |
| | ACTGAGAAGGTATATTGTTTACTTTACCAAATAACAAGTGTTG | 870 |
| | GAAGCAGGGAAGCTCTTCATCCTCACTAGATAAGTTCTCTTC | |
| | TGAGGACTCTAATTTCTTGGCCCCTCTTCGGTAACC | |
| | GTGAGGATGAAGAGCTT | 871 |
| | AAGCTCTTCATCCTCAC | 872 |
| Breast Cancer | TTATTTGGTAAAGTAAACAATATACCTTCTCAGTCTACTAGGC | 873 |
| Glu-1250-Stop | ATAGCACCGTTGCTACCGAGTGTCTGTCTAAGAACACAGAGG | |
| GAG to TAG | AGAATTTATTATCATTGAAGAATAGCTTAAATGACT | |
| | AGTCATTTAAGCTATTCTTCAATGATAATAAATTCTCCTCTGTG | 874 |
| | TTCTTAGACAGACACTCGGTAGCAACGGTGCTATGCCTAGTA | |
| | GACTGAGAAGGTATATTGTTTACTTTACCAAATAA | |
| | TTGCTACCGAGTGTCTG | 875 |
| | CAGACACTCGGTAGCAA | 876 |
| Breast Cancer | CTAGGCATAGCACCGTTGCTACCGAGTGTCTGTCTAAGAACA | 877 |
| Ser-1262-Stop | CAGAGGAGAATTTATTATCATTGAAGAATAGCTTAAATGACTG | |
| TCA to TAA | CAGTAACCAGGTAATATTGGCAAAGGCATCTCAGGA | |
| | TCCTGAGATGCCTTTGCCAATATTACCTGGTTACTGCAGTCAT | 878 |
| | TTAAGCTATTCTTCAATGATAATAAATTCTCCTCTGTGTTCTTA | |
| | GACAGACACTCGGTAGCAACGGTGCTATGCCTAG | |
| | TTTATTATCATTGAAGA | 879 |
| | TCTTCAATGATAATAAA | 880 |
| Breast Cancer | TTATCATTGAAGAATAGCTTAAATGACTGCAGTAACCAGGTAA | 881 |
| Gln-1281-Stop | TATTGGCAAAGGCATCTCAGGAACATCACCTTAGTGAGGAAA | |
| CAG to TAG | CAAAATGTTCTGCTAGCTTGTTTTCTTCACAGTGCA | |
| | TGCACTGTGAAGAAAACAAGCTAGCAGAACATTTTGTTTCCT | 882 |
| | CACTAAGGTGATGTTCCTGAGATGCCTTTGCCAATATTACCT | |
| | GGTTACTGCAGTCATTTAAGCTATTCTTCAATGATAA | |
| | AGGCATCTCAGGAACAT | 883 |
| | ATGTTCCTGAGATGCCT | 884 |
| Breast Cancer | GCTAGCTTGTTTTCTTCACAGTGCAGTGAATTGGAAGACTTG | 885 |
| Gln-1313-Stop | ACTGCAAATACAAACACCCAGGATCCTTTCTTGATTGGTTCTT | |
| CAG to TAG | CCAAACAAATGAGGCATCAGTCTGAAAGCCAGGGAG | |
| | CTCCCTGGCTTTCAGACTGATGCCTCATTTGTTTGGAAGAAC | 886 |
| | CAATCAAGAAAGGATCCTGGGTGTTTGTATTTGCAGTCAAGT | |
| | CTTCCAATTCACTGCACTGTGAAGAAAACAAGCTAGC | |
| | CAAACACCCAGGATCCT | 887 |
| | AGGATCCTGGGTGTTTG | 888 |
| Breast Cancer | TCACAGTGCAGTGAATTGGAAGACTTGACTGCAAATACAAAC | 889 |
| Ile-1318-Val | ACCCAGGATCCTTTCTTGATTGGTTCTTCCAAACAAATGAGG | |
| ATT to GTT | CATCAGTCTGAAAGCCAGGGAGTTGGTCTGAGTGACA | |
| | TGTCACTCAGACCAACTCCCTGGCTTTCAGACTGATGCCTCA | 890 |
| | TTTGTTTGGAAGAACCAATCAAGAAAGGATCCTGGGTGTTTG | |
| | TATTTGCAGTCAAGTCTTCCAATTCACTGCACTGTGA | |
| | CTTTCTTGATTGGTTCT | 891 |
| | AGAACCAATCAAGAAAG | 892 |
| Breast Cancer | TTGGAAGACTTGACTGCAAATACAAACACCCAGGATCCTTTC | 893 |
| Gln-1323-Stop | TTGATTGGTTCTTCCAAACAAATGAGGCATCAGTCTGAAAGC | |
| CAA to TAA | CAGGGAGTTGGTCTGAGTGACAAGGAATTGGTTTCAG | |
| | CTGAAACCAATTCCTTGTCACTCAGACCAACTCCCTGGCTTT | 894 |
| | CAGACTGATGCCTCATTTGTTTGGAAGAACCAATCAAGAAAG | |
| | GATCCTGGGTGTTTGTATTTGCAGTCAAGTCTTCCAA | |
| | CTTCCAAACAAATGAGG | 895 |
| | CCTCATTTGTTTGGAAG | 896 |
| Breast Cancer | CAGTCTGAAAGCCAGGGAGTTGGTCTGAGTGACAAGGAATT | 897 |
| Arg-1347-Gly | GGTTTCAGATGATGAAGAAAGAGGAACGGGCTTGGAAGAAA | |
| AGA to GGA | ATAATCAAGAAGAGCAAAGCATGGATTCAAACTTAGGTA | |
| | TACCTAAGTTTGAATCCATGCTTTGCTCTTCTTGATTATTTTCT | 898 |
| | TCCAAGCCCGTTCCTCTTTCTTCATCATCTGAAACCAATTCCT | |
| | TGTCACTCAGACCAACTCCCTGGCTTTCAGACTG | |
| | ATGAAGAAAGAGGAACG | 899 |
| | CGTTCCTCTTTCTTCAT | 900 |
| Breast Cancer | GAAACAAGCGTCTCTGAAGACTGCTCAGGGCTATCCTCTCAG | 901 |
| Gln-1395-Stop | AGTGACATTTTAACCACTCAGGTAAAAAGCGTGTGTGTGTGT | |
| CAG to TAG | GCACATGCGTGTGTGTGGTGTCCTTTGCATTCAGTAG | |
| | CTACTGAATGCAAAGGACACCACACACACGCATGTGCACACA | 902 |
| | CACACACGCTTTTTACCTGAGTGGTTAAAATGTCACTCTGAG | |
| | AGGATAGCCCTGAGCAGTCTTCAGAGACGCTTGTTTC | |
| | TAACCACTCAGGTAAAA | 903 |
| | TTTTACCTGAGTGGTTA | 904 |
| Breast Cancer | TGGTGCCATTTATCGTTTTTGAAGCAGAGGGATACCATGCAA | 905 |
| Gln-1408-Stop | CATAACCTGATAAAGCTCCAGCAGGAAATGGCTGAACTAGAA | |
| CAG to TAG | GCTGTGTTAGAACAGCATGGGAGCCAGCCTTCTAACA | |
| | TGTTAGAAGGCTGGCTCCCATGCTGTTCTAACACAGCTTCTA | 906 |
| | GTTCAGCCATTTCCTGCTGGAGCTTTATCAGGTTATGTTGCAT | |
| | GGTATCCCTCTGCTTCAAAAACGATAAATGGCACCA | |
| | TAAAGCTCCAGCAGGAA | 907 |
| | TTCCTGCTGGAGCTTTA | 908 |
| Breast Cancer | AGCCAGCCTTCTAACAGCTACCCTTCCATCATAAGTGACTCT | 909 |
| Arg-1443-Gly | TCTGCCCTTGAGGACCTGCGAAATCCAGAACAAAGCACATCA | |
| CGA to GGA | GAAAAAGGTGTGTATTGTTGGCCAAACACTGATATCT | |
| Arg-1443-Stop | AGATATCAGTGTTTGGCCAACAATACACACCTTTTTCTGATGT | 910 |
| CGA to TGA | GCTTTGTTCTGGATTTCGCAGGTCCTCAAGGGCAGAAGAGTC | |
| | ACTTATGATGGAAGGGTAGCTGTTAGAAGGCTGGCT | |
| | AGGACCTGCGAAATCCA | 911 |
| | TGGATTTCGCAGGTCCT | 912 |
| Breast Cancer | CAGAATAGAAACTACCCATCTCAAGAGGAGCTCATTAAGGTT | 913 |
| Ser-1512-Ile | GTTGATGTGGAGGAGCAACAGCTGGAAGAGTCTGGGCCACA | |
| AGT to ATT | CGATTTGACGGAAACATCTTACTTGCCAAGGCAAGATC | |
| | GATCTTGCCTTGGCAAGTAAGATGTTTCCGTCAAATCGTGTG | 914 |
| | GCCCAGACTCTTCCAGCTGTTGCTCCTCCACATCAACAACCT | |
| | TAATGAGCTCCTCTTGAGATGGGTAGTTTCTATTCTG | |
| | AGGAGCAACAGGTGGAA | 915 |
| | TTCCAGCTGTTGCTCCT | 916 |
| Breast Cancer | ATCTTTCTAGGTCATCCCCTTCTAAATGCCCATCATTAGATGA | 917 |
| Gln-1538-Stop | TAGGTGGTACATGCACAGTTGCTCTGGGAGTCTTCAGAATAG | |
| CAG to TAG | AAACTACCCATCTCAAGAGGAGCTCATTAAGGTTGT | |
| | ACAACCTTAATGAGCTCCTCTTGAGATGGGTAGTTTCTATTCT | 918 |
| | GAAGACTCCCAGAGCAACTGTGCATGTACCACCTATCATCTA | |
| | ATGATGGGCATTTAGAAGGGGATGACCTAGAAAGAT | |
| | CATGCACAGTTGCTCTG | 919 |
| | CAGAGCAACTGTGCATG | 920 |
| Breast Cancer | CAGAATAGAAACTACCCATCTCAAGAGGAGCTCATTAAGGTT | 921 |
| Glu-1541-Stop | GTTGATGTGGAGGAGCAACAGCTGGAAGAGTCTGGGCCACA | |
| GAG to TAG | CGATTTGACGGAAACATCTTACTTGCCAAGGCAAGATG | |
| | GATCTTGCCTTGGCAAGTAAGATGTTTCCGTCAAATCGTGTG | 922 |
| | GCCCAGAGTCTTCCAGCTGTTGCTCCTCCACATCAACAACCT | |
| | TAATGAGCTCCTCTTGAGATGGGTAGTTTCTATTCTG | |
| | AGGAGCAACAGCTGGAA | 923 |
| | TTCCAGCTGTTGCTCCT | 924 |
| Breast Cancer | AACTACCCATCTCAAGAGGAGCTCATTAAGGTTGTTGATGTG | 925 |
| Thr-1561-Ile | GAGGAGCAACAGCTGGAAGAGTCTGGGCCACACGATTTGAC | |
| ACG to ATC | GGAAACATCTTACTTGCCAAGGCAAGATCTAGGTAATA | |
| | TATTACCTAGATCTTGCCTTGGCAAGTAAGATGTTTCCGTCAA | 926 |
| | ATCGTGTGGCCCAGAGTCTTCCAGCTGTTGCTCCTCCACATC | |
| | AACAACCTTAATGAGCTCCTCTTGAGATGGGTAGTT | |
| | AGCTGGAAGAGTCTGGG | 927 |
| | CCCAGACTCTTCCAGCT | 928 |
| Breast Cancer | TTTGTAATTCAACATTCATCGTTGTGTAAATTAAACTTCTCCCA | 929 |
| Tyr-1563-Stop | TTCCTTTCAGAGGGAACCCCTTACCTGGAATCTGGAATCAGC | |
| TAC to TAG | CTCTTCTCTGATGACCCTGAATCTGATCCTTCTGA | |
| | TCAGAAGGATCAGATTCAGGGTCATCAGAGAAGAGGCTGATT | 930 |
| | CCAGATTCCAGGTAAGGGGTTCCCTCTGAAAGGAATGGGAG | |
| | AAGTTTAATTTACACAACGATGAATGTTGAATTACAAA | |
| | AGAGGGAACCCCTTACC | 931 |
| | GGTAAGGGGTTCCCTCT | 932 |
| Breast Cancer | CAACATTCATCGTTGTGTAAATTAAACTTCTCCCATTCCTTTC | 933 |
| Leu-1564-Pro | AGAGGGAACCCCTTACCTGGAATCTGGAATCAGCCTCTTCTC | |
| CTG to CCG | TGATGACCCTGAATCTGATCCTTCTGAAGACAGAGC | |
| | GCTCTGTCTTCAGAAGGATCAGATTCAGGGTCATCAGAGAAG | 934 |
| | AGGCTGATTCCAGATTCCAGGTAAGGGGTTCCCTCTGAAAG | |
| | GAATGGGAGAAGTTTAATTTACACAACGATGAATGTTG | |
| | CCCTTACCTGGAATCTG | 935 |
| | CAGATTCCAGGTAAGGG | 936 |
| Breast Cancer | GCCCCAGAGTCAGCTCGTGTTGGCAACATACCATCTTCAACC | 937 |
| Gln-1604-Stop | TCTGCATTGAAAGTTCCCCAATTGAAAGTTGCAGAATCTGCC | |
| CAA to TAA | CAGAGTCCAGCTGCTGCTCATACTACTGATACTGCTG | |
| | CAGCAGTATCAGTAGTATGAGCAGCAGCTGGACTCTGGGCA | 938 |
| | GATTCTGCAACTTTCAATTGGGGAACTTTCAATGCAGAGGTT | |
| | GAAGATGGTATGTTGCCAACACGAGCTGACTCTGGGGC | |
| | AAGTTCCCCAATTGAAA | 939 |
| | TTTCAATTGGGGAACTT | 940 |
| Breast Cancer | GAGTCAGCTCGTGTTGGCAACATACCATCTTCAACCTCTGCA | 941 |
| Lys-1606-Glu | TTGAAAGTTCCCCAATTGAAAGTTGCAGAATCTGCCCAGAGT | |
| AAA to GAA | CCAGCTGCTGCTCATACTACTGATACTGCTGGGTATA | |
| | TATACCCAGCAGTATCAGTAGTATGAGCAGCAGCTGGACTCT | 942 |
| | GGGCAGATTCTGCAACTTTCAATTGGGGAACTTTCAATGCAG | |
| | AGGTTGAAGATGGTATGTTGCCAACACGAGCTGACTC | |
| | CCCAATTGAAAGTTGCA | 943 |
| | TGCAACTTTCAATTGGG | 944 |
| Breast Cancer | CAGAATCTGCCCAGAGTCCAGCTGCTGCTCATACTACTGATA | 945 |
| Met-1628-Thr | CTGCTGGGTATAATGCAATGGAAGAAAGTGTGAGCAGGGAG | |
| ATG to ACG | AAGCCAGAATTGACAGCTTCAACAGAAAGGGTCAACAA | |
| | TTGTTGACCCTTTCTGTTGAAGCTGTCAATTCTGGCTTCTCCC | 946 |
| | TGCTCACACTTTCTTCCATTGCATTATACCCAGCAGTATCAGT | |
| | AGTATGAGCAGCAGCTGGACTCTGGGCAGATTCTG | |
| | TAATGCAATGGAAGAAA | 947 |
| | TTTCTTCCATTGCATTA | 948 |
| Breast Cancer | GCAGAATCTGCCCAGAGTCCAGCTGCTGCTCATACTACTGAT | 949 |
| Met-1628-Val | ACTGCTGGGTATAATGCAATGGAAGAAAGTGTGAGCAGGGA | |
| ATG to GTG | GAAGCCAGAATTGACAGCTTCAACAGAAAGGGTCAACA | |
| | TGTTGACCCTTTCTGTTGAAGCTGTCAATTCTGGCTTCTCCCT | 950 |
| | GCTCACACTTTCTTCCATTGCATTATACCCAGCAGTATCAGTA | |
| | GTATGAGCAGCAGCTGGACTCTGGGCAGATTCTGC | |
| | ATAATGCAATGGAAGAA | 951 |
| | TTCTTCCATTGCATTAT | 952 |
| Breast Cancer | CTCATACTACTGATACTGCTGGGTATAATGCAATGGAAGAAA | 953 |
| Pro-1637-Leu | GTGTGAGCAGGGAGAAGCCAGAATTGACAGCTTCAACAGAA | |
| CCA to CTA | AGGGTCAACAAAAGAATGTCCATGGTGGTGTCTGGCCT | |
| | AGGCCAGACACCACCATGGACATTCTTTTGTTGACCCTTTCT | 954 |
| | GTTGAAGCTGTCAATTCTGGCTTCTCCCTGCTCACACTTTCTT | |
| | CCATTGCATTATACCCAGCAGTATCAGTAGTATGAG | |
| | GGAGAAGCCAGAATTGA | 955 |
| | TCAATTCTGGCTTCTCC | 956 |
| Breast Cancer | GAGCAGGGAGAAGCCAGAATTGACAGCTTCAACAGAAAGGG | 957 |
| Met-1652-Ile | TCAACAAAAGAATGTCCATGGTGGTGTCTGGCCTGACCCCAG | |
| ATG to ATA | AAGAATTTGTGAGTGTATCCATATGTATCTCCCTAATG | |
| | CATTAGGGAGATACATATGGATACACTCACAAATTCTTCTGG | 958 |
| | GGTCAGGCCAGACACCACCATGGACATTCTTTTGTTGACCCT | |
| | TTCTGTTGAAGCTGTCAATTCTGGCTTCTCCCTGCTC | |
| | ATGTCCATGGTGGTGTC | 959 |
| | GACACCACCATGGACAT | 960 |
| Breast Cancer | CACTTCCTGATTTTGTTTTCAACTTCTAATCCTTTGAGTGTTTT | 961 |
| Glu-1694-Stop | TCATTCTGCAGATGCTGAGTTTGTGTGTGAACGGACACTGAA | |
| GAG to TAG | ATATTTTCTAGGAATTGCGGGAGGAAAATGGGTAG | |
| | CTACCCATTTTCCTCCCGCAATTCCTAGAAAATATTTCAGTGT | 962 |
| | CCGTTCACACACAAACTCAGCATCTGCAGAATGAAAAACACT | |
| | CAAAGGATTAGAAGTTGAAAACAAAATCAGGAAGTG | |
| | CAGATGCTGAGTTTGTG | 963 |
| | CACAAACTCAGCATCTG | 964 |
| Breast Cancer | CTGTTTTTCATTCTGCAGATGCTGAGTTTGTGTGTGAACGGA | 965 |
| Gly-1706-Glu | CACTGAAATATTTTCTAGGAATTGCGGGAGGAAAATGGGTAG | |
| GGA to GAA | TTAGCTATTTCTGTAAGTATAATACTATTTCTCCCCT | |
| | AGGGGAGAAATAGTATTATACTTACAGAAATAGCTAACTACC | 966 |
| | CATTTTCCTCCCGCAATTCCTAGAAAATATTTCAGTGTCCGTT | |
| | CACACACAAACTCAGCATCTGCAGAATGAAAAACAC | |
| | TTTTCTAGGAATTGCGG | 967 |
| | CCGCAATTCCTAGAAAA | 968 |
| Breast Cancer | TTCATTCTGCAGATGCTGAGTTTGTGTGTGAACGGACACTGA | 969 |
| Ala-1708-Glu | AATATTTTCTAGGAATTGCGGGAGGAAAATGGGTAGTTAGCT | |
| GCG to GAG | ATTTCTGTAAGTATAATACTATTTCTCCCCTCCTCCC | |
| | GGGAGGAGGGGAGAAATAGTATTATACTTACAGAAATAGCTA | 970 |
| | ACTACCCATTTTCCTCCCGCAATTCCTAGAAAATATTTCAGTG | |
| | TCCGTTCACACACAAACTCAGCATCTGCAGAATGAA | |
| | AGGAATTGCGGGAGGAA | 971 |
| | TTCCTCCCGCAATTCCT | 972 |
| Breast Cancer | CTGAGTTTGTGTGTGAACGGACACTGAAATATTTTCTAGGAAT | 973 |
| Val-1713-Ala | TGCGGGAGGAAAATGGGTAGTTAGCTATTTCTGTAAGTATAA | |
| GTA to GCA | TACTATTTCTCCCCTCCTCCCTTTAACACCTCAGAA | |
| | TTCTGAGGTGTTAAAGGGAGGAGGGGAGAAATAGTATTATAC | 974 |
| | TTACAGAAATAGCTAACTACCCATTTTCCTCCCGCAATTCCTA | |
| | GAAAATATTTCAGTGTCCGTTCACACACAAACTCAG | |
| | AAAATGGGTAGTTAGCT | 975 |
| | AGCTAACTACCCATTTT | 976 |
| Breast Cancer | AACGGACACTGAAATATTTTCTAGGAATTGCGGGAGGAAAAT | 977 |
| Trp-1718-Stop | GGGTAGTTAGCTATTTCTGTAAGTATAATACTATTTCTCCCCT | |
| TGG to TAG | CCTCCCTTTAACACCTCAGAATTGCATTTTTACACC | |
| | GGTGTAAAAATGCAATTCTGAGGTGTTAAAGGGAGGAGGGG | 978 |
| | AGAAATAGTATTATACTTACAGAAATAGCTAACTACCCATTTT | |
| | CCTCCCGCAATTCCTAGAAAATATTTCAGTGTCCGTT | |
| | CTATTTCTGTAAGTATA | 979 |
| | TATACTTACAGAAATAG | 980 |
| Breast Cancer | TTCTGCTGTATGTAACCTGTCTTTTCTATGATCTCTTTAGGGG | 981 |
| Glu-1725-Stop | TGACCCAGTCTATTAAAGAAAGAAAAATGCTGAATGAGGTAA | |
| GAA to TAA | GTACTTGATGTTACAAACTAACCAGAGATATTCATT | |
| | AATGAATATCTCTGGTTAGTTTGTAACATCAAGTACTTACCTC | 982 |
| | ATTCAGCATTTTTCTTTCTTTAATAGACTGGGTCACCCCTAAA | |
| | GAGATCATAGAAAAGACAGGTTACATACAGCAGAA | |
| | CTATTAAAGAAAGAAAA | 983 |
| | TTTTCTTTCTTTAATAG | 984 |
| Breast Cancer | TGTATGTAACCTGTCTTTTCTATGATCTCTTTAGGGGTGACCC | 985 |
| Lys-1727-Stop | AGTCTATTAAAGAAAGAAAAATGCTGAATGAGGTAAGTACTT | |
| AAA to TAA | GATGTTACAAACTAACCAGAGATATTCATTCAGTCA | |
| | TGACTGAATGAATATCTCTGGTTAGTTTGTAACATCAAGTACT | 986 |
| | TACCTCATTCAGCATTTTTCTTTCTTTAATAGACTGGGTCACC | |
| | CCTAAAGAGATCATAGAAAAGACAGGTTACATACA | |
| | AAGAAAGAAAAATGCTG | 987 |
| | CAGCATTTTTCTTTCTT | 988 |
| Breast Cancer | TCTTTCAGCATGATTTTGAAGTCAGAGGAGATGTGGTCAATG | 989 |
| Pro-1749-Arg | GAAGAAACCACCAAGGTCCAAAGCGAGCAAGAGAATCCCAG | |
| CCA to CGA | GACAGAAAGGTAAAGCTCCCTCCCTCAAGTTGACAAAA | |
| | TTTTGTCAACTTGAGGGAGGGAGCTTTACCTTTCTGTCCTGG | 990 |
| | GATTCTCTTGCTCGCTTTGGACCTTGGTGGTTTCTTCCATTGA | |
| | CCACATCTCCTCTGACTTCAAAATCATGCTGAAAGA | |
| | CCAAGGTCCAAAGCGAG | 991 |
| | CTCGCTTTGGACCTTGG | 992 |
| Breast Cancer | CAGCATGATTTTGAAGTCAGAGGAGATGTGGTCAATGGAAGA | 993 |
| Arg-1751-Stop | AACCACCAAGGTCCAAAGCGAGCAAGAGAATCCCAGGACAG | |
| CGA to TGA | AAAGGTAAAGCTCCCTCCCTCAAGTTGACAAAAATCTC | |
| | GAGATTTTTGTCAACTTGAGGGAGGGAGCTTTACCTTTCTGT | 994 |
| | CCTGGGATTCTCTTGCTCGCTTTGGACCTTGGTGGTTTCTTC | |
| | CATTGACCACATCTCCTCTGACTTCAAAATCATGCTG | |
| | GTCCAAAGCGAGCAAGA | 995 |
| | TCTTGCTCGCTTTGGAC | 996 |
| Breast Cancer | GTCAGAGGAGATGTGGTCAATGGAAGAAACCACCAAGGTCC | 997 |
| Gln-1756-Stop | AAAGCGAGCAAGAGAATCCCAGGACAGAAAGGTAAAGCTCC | |
| CAG to TAG | CTCCCTCAAGTTGACAAAAATCTCACCCCACCACTCTGT | |
| | ACAGAGTGGTGGGGTGAGATTTTTGTCAACTTGAGGGAGGG | 998 |
| | AGCTTTACCTTTCTGTCCTGGGATTCTCTTGCTCGCTTTGGAC | |
| | CTTGGTGGTTTCTTCCATTGACCACATCTCCTCTGAC | |
| | GAGAATCCCAGGACAGA | 999 |
| | TCTGTCCTGGGATTCTC | 1000 |
| Breast Cancer | CTCTCTTCTTCCAGATCTTCAGGGGGCTAGAAATCTGTTGCT | 1001 |
| Met-1775-Arg | ATGGGCCCTTCACCAACATGCCCACAGGTAAGAGCCTGGGA | |
| ATG to AGG | GAACCCCAGAGTTCCAGCACCAGCCTTTGTCTTACATA | |
| | TATGTAAGACAAAGGCTGGTGCTGGAACTCTGGGGTTCTCCC | 1002 |
| | AGGCTCTTACCTGTGGGCATGTTGGTGAAGGGCCCATAGCA | |
| | ACAGATTTCTAGCCCCCTGAAGATCTGGAAGAAGAGAG | |
| | CACCAACATGCCCACAG | 1003 |
| | CTGTGGGCATGTTGGTG | 1004 |
| Breast Cancer | AGTATGCAGATTACTGCAGTGATTTTACATCTAAATGTCCATT | 1005 |
| Trp-1782-Stop | TTAGATCAACTGGAATGGATGGTACAGCTGTGTGGTGCTTCT | |
| TGG to TGA | GTGGTGAAGGAGCTTTCATCATTCACCCTTGGCACA | |
| | TGTGCCAAGGGTGAATGATGAAAGCTCCTTCACCACAGAAGC | 1006 |
| | ACCACACAGCTGTACCATCCATTCCAGTTGATCTAAAATGGA | |
| | CATTTAGATGTAAAATCACTGCAGTAATCTGCATACT | |
| | CTGGAATGGATGGTACA | 1007 |
| | TGTACCATCCATTCCAG | 1008 |
| Breast Cancer | ATTACTGCAGTGATTTTACATCTAAATGTCCATTTTAGATCAA | 1009 |
| Gln-1785-His | CTGGAATGGATGGTACAGCTGTGTGGTGCTTCTGTGGTGAA | |
| CAG to CAT | GGAGCTTTCATCATTCACCCTTGGCACAGTAAGTATT | |
| | AATACTTACTGTGCCAAGGGTGAATGATGAAAGCTCCTTCAC | 1010 |
| | CACAGAAGCACCACACAGCTGTACCATCCATTCCAGTTGATC | |
| | TAAAATGGACATTTAGATGTAAAATCACTGCAGTAAT | |
| | ATGGTACAGCTGTGTGG | 1011 |
| | CCACACAGCTGTACCAT | 1012 |
| Breast Cancer | GTCCATTTTAGATCAACTGGAATGGATGGTACAGCTGTGTGG | 1013 |
| Glu-1794-Asp | TGCTTCTGTGGTGAAGGAGCTTTCATCATTCACCCTTGGCAC | |
| GAG to GAT | AGTAAGTATTGGGTGCCCTGTCAGAGAGGGAGGACAC | |
| | GTGTCCTCCCTCTCTGACAGGGCACCCAATACTTACTGTGCC | 1014 |
| | AAGGGTGAATGATGAAAGCTCCTTCACCACAGAAGCACCACA | |
| | CAGCTGTACCATCCATTCCAGTTGATCTAAAATGGAC | |
| | GTGAAGGAGCTTTCATC | 1015 |
| | GATGAAAGCTCCTTCAC | 1016 |
| Breast Cancer | CTCTGCTTGTGTTCTCTGTCTCCAGCAATTGGGCAGATGTGT | 1017 |
| Arg-1835-Stop | GAGGCACCTGTGGTGACCCGAGAGTGGGTGTTGGACAGTGT | |
| CGA to TGA | AGCACTCTACCAGTGCCAGGAGCTGGACACCTACCTGA | |
| | TCAGGTAGGTGTCCAGCTCCTGGCACTGGTAGAGTGCTACA | 1018 |
| | CTGTCCAACACCCACTCTCGGGTCACCACAGGTGCCTCACA | |
| | CATCTGCCCAATTGCTGGAGACAGAGAACACAAGCAGAG | |
| | TGGTGACCCGAGAGTGG | 1019 |
| | CCACTCTCGGGTCACCA | 1020 |
| Breast Cancer | TTGTGTTCTCTGTCTCCAGCAATTGGGCAGATGTGTGAGGCA | 1021 |
| Trp-1837-Arg | CCTGTGGTGACCCGAGAGTGGGTGTTGGACAGTGTAGCACT | |
| TGG to CGG | CTACCAGTGCCAGGAGCTGGACACCTACCTGATACCCC | |
| | GGGGTATCAGGTAGGTGTCCAGCTCCTGGCACTGGTAGAGT | 1022 |
| | GCTACACTGTCCAACACCCACTCTCGGGTCACCACAGGTGC | |
| | CTCACACATCTGCCCAATTGCTGGAGACAGAGAACACAA | |
| | CCCGAGAGTGGGTGTTG | 1023 |
| | CAACACCCACTCTCGGG | 1024 |
| Breast Cancer | TGTGTTCTCTGTCTCCAGCAATTGGGCAGATGTGTGAGGCAC | 1025 |
| Trp-1837-Stop | CTGTGGTGACCCGAGAGTGGGTGTTGGACAGTGTAGCACTC | |
| TGG to TAG | TACCAGTGCCAGGAGCTGGACACCTACCTGATACCCCA | |
| | TGGGGTATCAGGTAGGTGTCCAGCTCCTGGCACTGGTAGAG | 1026 |
| | TGCTACACTGTCCAACACCCACTCTCGGGTCACCACAGGTG | |
| | CCTCACACATCTGCCCAATTGCTGGAGACAGAGAACACA | |
| | CCGAGAGTGGGTGTTGG | 1027 |
| | CCAACACCCACTCTCGG | 1028 |

[0221] TABLE 10
BRCA2 Mutations and Genome-Correcting Oligos

| Clinical Phenotype & | | SEQ ID |
|---|---|---|
| Mutation | Correcting Oligos | NO: |
| Breast cancer | GTTAAAACTAAGGTGGGATTTTTTTTTTAAATAGATTTAGGAC | 1029 |
| PHE32LEU | CAATAAGTCTTAATTGGTTTGAAGAACTTTCTTCAGAAGCTCC | |
| TTT to CTT | ACCCTATAATTCTGAACCTGCAGAAGAATCTGAAC | |
| | GTTCAGATTCTTCTGCAGGTTCAGAATTATAGGGTGGAGCTT | 1030 |
| | CTGAAGAAAGTTCTTCAAACCAATTAAGACTTATTGGTCCTAA | |
| | ATCTATTTAAAAAAAAAATCCCACCTTAGTTTTAAC | |
| | TTAATTGGTTTGAAGAA | 1031 |
| | TTCTTCAAACCAATTAA | 1032 |
| Breast cancer | TAGATTTAGGACCAATAAGTCTTAATTGGTTTGAAGAACTTTC | 1033 |
| TYR42CYS | TTCAGAAGCTCCACCCTATAATTCTGAACCTGCAGAAGAATC | |
| TAT to TGT | TGAACATAAAAACAACAATTACGAACCAAACCTATT | |
| | AATAGGTTTGGTTCGTAATTGTTGTTTTTATGTTCAGATTCTTC | 1034 |
| | TGCAGGTTCAGAATTATAGGGTGGAGCTTCTGAAGAAAGTTC | |
| | TTCAAACCAATTAAGACTTATTGGTCCTAAATCTA | |
| | TCCACCCTATAATTCTG | 1035 |
| | CAGAATTATAGGGTGGA | 1036 |
| Breast cancer | AAGAACTTTCTTCAGAAGCTCCACCCTATAATTCTGAACCTGC | 1037 |
| LYS53ARG | AGAAGAATCTGAACATAAAAACAACAATTACGAACCAAACCTA | |
| AAA to AGA | TTTAAAACTCCACAAAGGAAACCATCTTATAATCA | |
| | TGATTATAAGATGGTTTCCTTTGTGGAGTTTTAAATAGGTTTG | 1038 |
| | GTTCGTAATTGTTGTTTTTATGTTCAGATTCTTCTGCAGGTTC | |
| | AGAATTATAGGGTGGAGCTTCTGAAGAAAGTTCTT | |
| | TGAACATAAAAACAACA | 1039 |
| | TGTTGTTTTTATGTTCA | 1040 |
| Breast cancer | CTATTTAAAACTCCACAAAGGAAACCATCTTATAATCAGCTGG | 1041 |
| Phe81Leu | CTTCAACTCCAATAATATTCAAAGAGCAAGGGCTGACTCTGC | |
| TTC to CTC | CGCTGTACCAATCTCCTGTAAAAGAATTAGATAAAT | |
| | ATTTATCTAATTCTTTTACAGGAGATTGGTACAGCGGCAGAGT | 1042 |
| | CAGCCCTTGCTCTTTGAATATTATTGGAGTTGAAGCCAGCTG | |
| | ATTATAAGATGGTTTCCTTTGTGGAGTTTTAAATAG | |
| | CAATAATATTCAAAGAG | 1043 |
| | CTCTTTGAATATTATTG | 1044 |
| Breast cancer | GTCAGACACCAAAACATATTTCTGAAAGTCTAGGAGCTGAGG | 1045 |
| TRP194TERM | TGGATCCTGATATGTCTTGGTCAAGTTCTTTAGCTACACCACC | |
| TGG to TAG | CACCCTTAGTTCTACTGTGCTCATAGGTAATAATAG | |
| | CTATTATTACCTATGAGCACAGTAGAACTAAGGGTGGGTGGT | 1046 |
| | GTAGCTAAAGAACTTGACCAAGACATATCAGGATCCACCTCA | |
| | GCTCCTAGACTTTCAGAAATATGTTTTGGTGTCTGAC | |
| | TATGTCTTGGTCAAGTT | 1047 |
| | AACTTGACCAAGACATA | 1048 |
| Breast cancer | CTGAAAGTCTAGGAGCTGAGGTGGATCCTGATATGTCTTGGT | 1049 |
| PRO201ARG | CAAGTTCTTTAGCTACACCACCCACCCTTAGTTCTACTGTGCT | |
| CCA to CGA | CATAGGTAATAATAGCAAATGTGTATTTACAAGAAA | |
| | TTTCTTGTAAATACACATTTGCTATTATTACCTATGAGCACAGT | 1050 |
| | AGAACTAAGGGTGGGTGGTGTAGCTAAAGAACTTGACCAAG | |
| | ACATATCAGGATCCACCTCAGCTCCTAGACTTTCAG | |
| | AGCTACACCACCCACCC | 1051 |
| | GGGTGGGTGGTGTAGCT | 1052 |
| Breast cancer | ACAATACACATAAATTTTTATCTTACAGTCAGAAATGAAGAAG | 1053 |
| Pro222Ser | CATCTGAAACTGTATTTCCTCATGATACTACTGCTGTAAGTAA | |
| CCT to TCT | ATATGACATTGATTAGACTGTTGAAATTGCTAACA | |
| | TGTTAGCAATTTCAACAGTCTAATCAATGTCATATTTACTTACA | 1054 |
| | GCAGTAGTATCATGAGGAAATACAGTTTCAGATGCTTCTTCAT | |
| | TTCTGACTGTAAGATAAAAATTTATGTGTATTGT | |
| | CTGTATTTCCTCATGAT | 1055 |
| | ATCATGAGGAAATACAG | 1056 |
| Breast cancer | AATGGTCTCAACTAACCCTTTCAGGTCTAAATGGAGCCCAGA | 1057 |
| Leu-414-Term | TGGAGAAAATACCCCTATTGCATATTTCTTCATGTGACCAAAA | |
| TTG to TAG | TATTTCAGAAAAAGACCTATTAGACACAGAGAACAA | |
| | TTGTTCTCTGTGTCTAATAGGTCTTTTTCTGAAATATTTTGGTC | 1058 |
| | ACATGAAGAAATATGCAATAGGGGTATTTTCTCCATCTGGGC | |
| | TCCATTTAGACCTGAAAGGGTTAGTTGAGACCATT | |
| | ACCCCTATTGCATATTT | 1059 |
| | AAATATGCAATAGGGGT | 1060 |
| Breast cancer, male | AGCCTCTGAAAGTGGACTGGAAATACATACTGTTTGCTCACA | 1061 |
| Cys554Trp | GAAGGAGGACTCCTTATGTCCAAATTTAATTGATAATGGAAG | |
| TGT to TGG | CTGGCCAGCCACCACCACACAGAATTCTGTAGCTTTG | |
| | CAAAGCTACAGAATTCTGTGTGGTGGTGGCTGGCCAGCTTC | 1062 |
| | CATTATCAATTAAATTTGGACATAAGGAGTCCTCCTTCTGTGA | |
| | GCAAACAGTATGTATTTCCAGTCCACTTTCAGAGGCT | |
| | TCCTTATGTCCAAATTT | 1063 |
| | AAATTTGGACATAAGGA | 1064 |
| Breast cancer | AACTCTACCATGGTTTTATATGGAGACACAGGTGATAAACAA | 1065 |
| Lys944Term | GCAACCCAAGTGTCAATTAAAAAAGATTTGGTTTATGTTCTTG | |
| AAA to TAA | CAGAGGAGAACAAAAATAGTGTAAAGCAGCATATAA | |
| | TTATATGCTGCTTTACACTATTTTTGTTCTCCTCTGCAAGAAC | 1066 |
| | ATAAACCAAATCTTTTTTAATTGACACTTGGGTTGCTTGTTTAT | |
| | CACCTGTGTCTCCATATAAAACCATGGTAGAGTT | |
| | TGTCAATTAAAAAAGAT | 1067 |
| | ATCTTTTTTAATTGACA | 1068 |
| Breast cancer, male | ATGACTACTGGCACTTTTGTTGAAGAAATTACTGAAAATTACA | 1069 |
| Glu1320Term | AGAGAAATACTGAAAATGAAGATAACAAATATACTGCTGCCA | |
| GAA to TAA | GTAGAAATTCTCATAACTTAGAATTTGATGGCAGTG | |
| | CACTGCCATCAAATTCTAAGTTATGAGAATTTCTACTGGCAGC | 1070 |
| | AGTATATTTGTTATCTTCATTTTCAGTATTTCTCTTGTAATTTTC | |
| | AGTAATTTCTTCAACAAAAGTGCCAGTAGTCAT | |
| | CTGAAAATGAAGATAAC | 1071 |
| | GTTATCTTCATTTTCAG | 1072 |
| Breast cancer | CATGAAACAATTAAAAAAGTGAAAGACATATTTACAGACAGTT | 1073 |
| Glu1876Term | TCAGTAAAGTAATTAAGGAAAACAACGAGAATAAATCAAAAAT | |
| GAA to TAA | TTGCCAAACGAAAATTATGGCAGGTTGTTACGAGG | |
| | CCTCGTAACAACCTGCCATAATTTTCGTTTGGCAAATTTTTGA | 1074 |
| | TTTATTCTCGTTGTTTTCCTTAATTACTTTACTGAAACTGTCTG | |
| | TAAATATGTCTTTCACTTTTTTAATTGTTTCATG | |
| | TAATTAAGGAAAACAAC | 1075 |
| | GTTGTTTTCCTTAATTA | 1076 |
| Breast cancer | TGAAAGACATATTTACAGACAGTTTCAGTAAAGTAATTAAGGA | 1077 |
| Ser1882Term | AAACAACGAGAATAAATCAAAAATTTGCCAAACGAAAATTATG | |
| TCA to TAA | GCAGGTTGTTACGAGGCATTGGATGATTCAGAGGA | |
| | TCCTCTGAATCATCCAATGCCTCGTAACAACCTGCCATAATTT | 1078 |
| | TCGTTTGGCAAATTTTTGATTTATTCTCGTTGTTTTCCTTAATT | |
| | ACTTTACTGAAACTGTCTGTAAATATGTCTTTCA | |
| | GAATAAATCAAAAATTT | 1079 |
| | AAATTTTTGATTTATTC | 1080 |
| Breast cancer | AACCAAAATATGTCTGGATTGGAGAAAGTTTCTAAAATATCAC | 1081 |
| Glu1953Term | CTTGTGATGTTAGTTTGGAAACTTCAGATATATGTAAATGTAG | |
| GAA to TAA | TATAGGGAAGCTTCATAAGTCAGTCTCATCTGCAA | |
| | TTGCAGATGAGACTGACTTATGAAGCTTCCCTATACTACATTT | 1082 |
| | ACATATATCTGAAGTTTCCAAACTAACATCACAAGGTGATATT | |
| | TTAGAAACTTTCTCCAATCCAGACATATTTTGGTT | |
| | TTAGTTTGGAAACTTCA | 1083 |
| | TGAAGTTTCCAAACTAA | 1084 |
| Breast cancer | TTAGTTTGGAAACTTCAGATATATGTAAATGTAGTATAGGGAA | 1085 |
| Ser1970Term | GCTTCATAAGTCAGTCTCATCTGCAAATACTTGTGGGATTTTT | |
| TCA to TAA | AGCACAGCAAGTGGAAAATCTGTCCAGGTATCAGA | |
| | TCTGATACCTGGACAGATTTTCCACTTGCTGTGCTAAAAATCC | 1086 |
| | CACAAGTATTTGCAGATGAGACTGACTTATGAAGCTTCCCTAT | |
| | ACTACATTTACATATATCTGAAGTTTCCAAACTAA | |
| | GTCAGTCTCATCTGCAA | 1087 |
| | TTGCAGATGAGACTGAC | 1088 |
| Breast cancer | AAGTCAGTCTCATCTGCAAATACTTGTGGGATTTTTAGCACAG | 1089 |
| Gln1987Term | CAAGTGGAAAATCTGTCCAGGTATCAGATGCTTCATTACAAA | |
| CAG | ACGCAAGACAAGTGTTTTCTGAAATAGAAGATAGTA | |
| | TACTATCTTCTATTTCAGAAAACACTTGTCTTGCGTTTTGTAAT | 1090 |
| | GAAGCATCTGATACCTGGACAGATTTTCCACTTGCTGTGCTA | |
| | AAAATCCCACAAGTATTTGCAGATGAGACTGACTT | |
| | AATCTGTCCAGGTATCA | 1091 |
| | TGATACCTGGACAGATT | 1092 |
| Breast cancer | AAAATAAGATTAATGACAATGAGATTCATCAGTTTAACAAAAA | 1093 |
| Ala2466Val | CAACTCCAATCAAGCAGCAGCTGTAACTTTCACAAAGTGTGA | |
| GCA to GTA | AGAAGAACCTTTAGGTATTGTATGACAATTTGTGTG | |
| | CACACAAATTGTCATACAATACCTAAAGGTTCTTCTTCACACT | 1094 |
| | TTGTGAAAGTTACAGCTGCTGCTTGATTGGAGTTGTTTTTGTT | |
| | AAACTGATGAATCTCATTGTCATTAATCTTATTTT | |
| | TCAAGCAGCAGCTGTAA | 1095 |
| | TTACAGCTGCTGCTTGA | 1096 |
| Breast cancer | AGGCAACGCGTCTTTCCACAGCCAGGCAGTCTGTATCTTGCA | 1097 |
| Arg2 | AAAACATCCACTCTGCCTCGAATCTCTCTGAAAGCAGCAGTA | |
| | GGAGGCCAAGTCCCCTCTGCGTGTCCTCATAAACAGG | |
| | CCTGTTTATGAGGACACGCAGAGGGGACTTGGCCTCCTACT | 1098 |
| | GCTGCTTTCAGAGAGATTCGAGGCAGAGTGGATGTTTTTGCA | |
| | AGATACAGACTGCCTGGCTGTGGAAAGACGCGTTGCCT | |
| | CTCTGCCTCGAATCTCT | 1099 |
| | AGAGATTCGAGGCAGAG | 1100 |
| Breast cancer | ATTTCATTGAGCGCAAATATATCTGAAACTTCTAGCAATAAAA | 1101 |
| Gln2714Term | CTAGTAGTGCAGATACCCAAAAAGTGGCCATTATTGAACTTA | |
| CAA to TAA | CAGATGGGTGGTATGCTGTTAAGGCCCAGTTAGATC | |
| | GATCTAACTGGGCCTTAACAGCATACCACCCATCTGTAAGTT | 1102 |
| | CAATAATGGCCACTTTTTGGGTATCTGCACTACTAGTTTTATT | |
| | GCTAGAAGTTTCAGATATATTTGCGCTCAATGAAAT | |
| | CAGATACCCAAAAAGTG | 1103 |
| | CACTTTTTGGGTATCTG | 1104 |
| Breast cancer | CAGAACTGGTGGGCTCTCCTGATGCCTGTACACCTCTTGAAG | 1105 |
| Leu2776Term | CCCCAGAATCTCTTATGTTAAAGGTAAATTAATTTGCACTCTT | |
| TTA to TGA | GGTAAAAATCAGTCATTGATTCAGTTAAATTCTAGA | |
| | TCTAGAATTTAACTGAATCAATGACTGATTTTTACCAAGAGTG | 1106 |
| | CAAATTAATTTACCTTTAACATAAGAGATTCTGGGGCTTCAAG | |
| | AGGTGTACAGGCATCAGGAGAGCCCACCAGTTCTG | |
| | TCTTATGTTAAAGATTT | 1107 |
| | AAATCTTTAACATAAGA | 1108 |
| Breast cancer | CCTTTTGTTTTCTTAGAAAACACAACAAAACCATATTTACCATC | 1109 |
| Gln2893Term | ACGTGCACTAACAAGACAGCAAGTTCGTGCTTTGCAAGATGG | |
| CAG to TAG | TGCAGAGCTTTATGAAGCAGTGAAGAATGCAGCAG | |
| | CTGCTGCATTCTTCACTGCTTCATAAAGCTCTGCACCATCTTG | 1110 |
| | CAAAGCACGAACTTGCTGTCTTGTTAGTGCACGTGATGGTAA | |
| | ATATGGTTTTGTTGTGTTTTCTAAGAAAACAAAAGG | |
| | TAACAAGACAGCAAGTT | 1111 |
| | AACTTGCTGTCTTGTTA | 1112 |
| Breast cancer | AATCACAGGCAAATGTTGAATGATAAGAAACAAGCTCAGATC | 1113 |
| Ala2951Thr | CAGTTGGAAATTAGGAAGGCCATGGAATCTGCTGAACAAAAG | |
| GCC to ACC | GAACAAGGTTTATCAAGGGATGTCACAACCGTGTGGA | |
| | TCCACACGGTTGTGACATCCCTTGATAAACCTTGTTCCTTTTG | 1114 |
| | TTCAGCAGATTCCATGGCCTTCCTAATTTCCAACTGGATCTGA | |
| | GCTTGTTTCTTATCATTCAACATTTGCCTGTGATT | |
| | TTAGGAAGGCCATGGAA | 1115 |
| | TTCCATGGCCTTCCTAA | 1116 |
| Breast cancer | ACAATTTACTGGCAATAAAGTTTTGGATAGACCTTAATGAGGA | 1117 |
| Met3118Th | CATTATTAAGCCTCATATGTTAATTGCTGCAAGCAACCTCCAG | |
| | TGGCGACCAGAATCCAAATCAGGCCTTCTTACTTT | |
| | AAAGTAAGAAGGCCTGATTTGGATTCTGGTCGCCACTGGAG | 1118 |
| | GTTGCTTGCAGCAATTAACATATGAGGCTTAATAATGTCCTCA | |
| | TTAAGGTCTATCCAAAACTTTATTGCCAGTAAATTGT | |
| | GCCTCATATGTTAATTG | 1119 |
| | CAATTAACATATGAGGC | 1120 |
| Breast cancer | GACTGAAACGACGTTGTACTACATCTCTGATCAAAGAACAGG | 1121 |
| Thr3401Met | AGAGTTCCCAGGCCAGTACGGAAGAATGTGAGAAAAATAAG | |
| ACG to ATG | CAGGACACAATTACAACTAAAAAATATATCTAAGCATT | |
| | AATGCTTAGATATATTTTTTAGTTGTAATTGTGTCCTGCTTATT | 1122 |
| | TTTCTCACATTCTTCCGTACTGGCCTGGGAACTCTCCTGTTCT | |
| | TTGATCAGAGATGTAGTACAACGTCGTTTCAGTC | |
| | GGCCAGTACGGAAGAAT | 1123 |
| | ATTCTTCCGTACTGGCC | 1124 |
| Breast cancer | AAAGAACAGGAGAGTTCCCAGGCCAGTACGGAAGAATGTGA | 1125 |
| Ile3412Val | GAAAAATAAGCAGGACACAATTACAACTAAAAAATATATCTAA | |
| ATT to GTT | GCATTTGCAAAGGCGACAATAAATTATTGACGCTTAA | |
| | TTAAGCGTCAATAATTTATTGTCGCCTTTGCAAATGCTTAGAT | 1126 |
| | ATATTTTTTAGTTGTAATTGTGTCCTGCTTATTTTTCTCACATT | |
| | CTTCCGTACTGGCCTGGGAACTCTCCTGTTCTTT | |
| | AGGACACAATTACAACT | 1127 |
| | AGTTGTAATTGTGTCCT | 1128 |

### EXAMPLE 10

### Cystic Fibrosis—CFTR

[0222] Cystic fibrosis is a lethal disease affecting approximately one in 2,500 live Caucasian births and is the most common autosomal recessive disease in Caucasians. Patients with this disease have reduced chloride ion permeability in the secretory and absorptive cells of organs with epithelial cell linings, including the airways, pancreas, intestine, sweat glands and male genital tract. This, in turn, reduces the transport of water across the epithelia. The lungs and the GI tract are the predominant organ systems affected in this disease and the pathology is characterized by blocking of the respiratory and GI tracts with viscous mucus. The chloride impermeability in affected tissues is due to mutations in a specific chloride channel, the cystic fibrosis transmembrane conductance regulator protein (CFTR), which prevents normal passage of chloride ions through the cell membrane (Welsh et al., Neuron, 8:821-829 (1992)). Damage to the lungs due to mucus blockage, frequent bacterial infections and inflammation is the primary cause of morbidity and mortality in CF patients and, although maintenance therapy has improved the quality of patients' lives, the median age at death is still only around 30 years. There is no effective treatment for the disease, and therapeutic research is focused on gene therapy using exogenous transgenes in viral vectors and/or activating the defective or other chloride channels in the cell membrane to normalize chloride permeability (Tizzano et al., J. Pediat., 120:337-349 (1992)). However, the death of a teenage patient treated with an adenovirus vector carrying an exogenous CFTR gene in clinical trials in the late 1990's has impacted this area of research.

[0223] The oligonucleotides of the invention for correction of the CFTR gene are attached as a table.

TABLE 12
CFTR Mutations and Genome-Correcting Oligos

| Clinical Phenotype & | | SEQ ID |
|---|---|---|
| Mutation | Correcting Oligos | NO: |
| Cystic fibrosis | AAGGATACAGACAGCGCCTGGAATTGTCAGACATATACCAAA | 1129 |
| Ala46Asp | TCCCTTCTGTTGATTCTGCTGACAATCTATCTGAAAAATTGGA | |
| GCT to GAT | AAGGTATGTTCATGTACATTGTTTAGTTGAAGAGAG | |
| | CTCTCTTCAACTAAACAATGTACATGAACATACCTTTCCAATT | 1130 |
| | TTTCAGATAGATTGTCAGCAGAATCAACAGAAGGGATTTGGT | |
| | ATATGTCTGACAATTCCAGGCGCTGTCTGTATCCTT | |
| | TGATTCTGCTGACAATC | 1131 |
| | GATTGTCAGCAGAATCA | 1132 |
| Cystic fibrosis | AGCGCCTGGAATTGTCAGACATATACCAAATCCCTTCTGTTG | 1133 |
| Ser50Tyr | ATTCTGCTGACAATCTATCTGAAAAATTGGAAAGGTATGTTCA | |
| TCT to TAT | TGTACATTGTTTAGTTGAAGAGAGAAATTCATATTA | |
| | TAATATGAATTTCTCTCTTCAACTAAACAATGTACATGAACATA | 1134 |
| | CCTTTCCAATTTTTCAGATAGATTGTCAGCAGAATCAACAGAA | |
| | GGGATTTGGTATATGTCTGACAATTCCAGGCGCT | |
| | CAATCTATCTGAAAAAT | 1135 |
| | ATTTTTCAGATAGATTG | 1136 |
| Congenital absence | AGGACAACTAAAATATTTGCACATGCAACTTATTGGTCCCACT | 1137 |
| of vas deferens | TTTTATTCTTTTGCAGAGAATGGGATAGAGAGCTGGCTTCAAA | |
| Glu56Lys | GAAAAATCCTAAACTCATTAATGCCCTTCGGCGAT | |
| GAA-AAA | | |
| | ATCGCCGAAGGGCATTAATGAGTTTAGGATTTTTCTTTGAAG | 1138 |
| | CCAGCTCTCTATCCCATTCTCTGCAAAAGAATAAAAAGTGGG | |
| | ACCAATAAGTTGCATGTGCAAATATTTTAGTTGTCCT | |
| | TTTGCAGAGAATGGGAT | 1139 |
| | ATCCCATTCTCTGCAAA | 1140 |
| Cystic fibrosis | AGGACAACTAAAATATTTGCACATGCAACTTATTGGTCCCACT | 1141 |
| Trp57Gly | TTTTATTCTTTTGCAGAGAATGGGATAGAGAGCTGGCTTCAAA | |
| TGG to GGG | GAAAAATCCTAAACTCATTAATGCCCTTCGGCGAT | |
| | ATCGCCGAAGGGCATTAATGAGTTTAGGATTTTTCTTTGAAG | 1142 |
| | CCAGCTCTCTATCCCATTCTCTGCAAAAGAATAAAAAGTGGG | |
| | ACCAATAAGTTGCATGTGCAAATATTTTAGTTGTCCT | |
| | TTTGCAGAGAATGGGAT | 1143 |
| | ATCCCATTCTCTGCAAA | 1144 |
| Cystic fibrosis | AACTAAAATATTTGCACATGCAACTTATTGGTCCCACTTTTTAT | 1145 |
| Trp57Term | TCTTTTGCAGAGAATGGGATAGAGAGCTGGCTTCAAAGAAAA | |
| TGG to TGA | ATCCTAAACTCATTAATGCCCTTCGGCGATGTTTT | |
| | AAAACATCGCCGAAGGGCATTAATGAGTTTAGGATTTTTCTTT | 1146 |
| | GAAGCCAGCTCTCTATCCCATTCTCTGCAAAAGAATAAAAAG | |
| | TGGGACCAATAAGTTGCATGTGCAAATATTTTAGTT | |
| | AGAGAATGGGATAGAGA | 1147 |
| | TCTCTATCCCATTCTCT | 1148 |
| Congenital absence | ACTAAAATATTTGCACATGCAACTTATTGGTCCCACTTTTTATT | 1149 |
| of vas deferens | CTTTTGCAGAGAATGGGATAGAGAGCTGGCTTCAAAGAAAAA | |
| Asp58Asn | TCCTAAACTCATTAATGCCCTTCGGCGATGTTTTT | |
| GAT to AAT | | |
| | AAAAACATCGCCGAAGGGCATTAATGAGTTTAGGATTTTTCTT | 1150 |
| | TGAAGCCAGCTCTCTATCCCATTCTCTGCAAAAGAATAAAAA | |
| | GTGGGACCAATAAGTTGCATGTGCAAATATTTTAGT | |
| | GAGAATGGGATAGAGAG | 1151 |
| | CTCTCTATCCCATTCTC | 1152 |
| Cystic fibrosis | ATATTTGCACATGCAACTTATTGGTCCCACTTTTTATTCTTTTG | 1153 |
| Glu60Term | CAGAGAATGGGATAGAGAGCTGGCTTCAAAGAAAAATCCTAA | |
| GAG to TAG | ACTCATTAATGCCCTTCGGCGATGTTTTTTCTGGA | |
| | TCCAGAAAAAACATCGCCGAAGGGCATTAATGAGTTTAGGAT | 1154 |
| | TTTTCTTTGAAGCCAGCTCTCTATCCCATTCTCTGCAAAAGAA | |
| | TAAAAAGTGGGACCAATAAGTTGCATGTGCAAATAT | |
| | GGGATAGAGAGCTGGCT | 1155 |
| | AGCCAGCTCTCTATCCC | 1156 |
| Cystic fibrosis | GGTCCCACTTTTTATTCTTTTGCAGAGAATGGGATAGAGAGC | 1157 |
| | TGGCTTCAAAGAAAAATCCTAAACTCATTAATGCCCTTCGGC | |
| | GATGTTTTTTCTGGAGATTTATGTTCTATGGAATCTT | |
| | AAGATTCCATAGAACATAAATCTCCAGAAAAAACATCGCCGA | 1158 |
| | AGGGCATTAATGAGTTTAGGATTTTTCTTTGAAGCCAGCTCTC | |
| | TATCCCATTCTCTGCAAAAGAATAAAAAGTGGGACC | |
| | GAAAAATCCTAAACTCA | 1159 |
| | TGAGTTTAGGATTTTTC | 1160 |
| Cystic fibrosis | TGCAGAGAATGGGATAGAGAGCTGGCTTCAAAGAAAAATCCT | 1161 |
| Arg74Trp | AAACTCATTAATGCCCTTCGGCGATGTTTTTTCTGGAGATTTA | |
| CGG to TGG | TGTTCTATGGAATCTTTTTATATTTAGGGGTAAGGA | |
| | TCCTTACCCCTAAATATAAAAAGATTCCATAGAACATAAATCT | 1162 |
| | CCAGAAAAAACATCGCCGAAGGGCATTAATGAGTTTAGGATT | |
| | TTTCTTTGAAGCCAGCTCTCTATCCCATTCTCTGCA | |
| | ATGCCCTTCGGCGATGT | 1163 |
| | ACATCGCCGAAGGGCAT | 1164 |
| Congenital absence | GAGAATGGGATAGAGAGCTGGCTTCAAAGAAAAATCCTAAAC | 1165 |
| of vas deferens | TCATTAATGCCCTTCGGCGATGTTTTTTCTGGAGATTTATGTT | |
| ARG75GLN | CTATGGAATCTTTTTATATTTAGGGGTAAGGATCTC | |
| CGA | | |
| | GAGATCCTTACCCCTAAATATAAAAAGATTCCATAGAACATAA | 1166 |
| | ATCTCCAGAAAAAACATCGCCGAAGGGCATTAATGAGTTTAG | |
| | GATTTTTCTTTGAAGCCAGCTCTCTATCCCATTCTC | |
| | CCTTCGGCGATGTTTTT | 1167 |
| | AAAAACATCGCCGAAGG | 1168 |
| Cystic fibrosis | GAGAATGGGATAGAGAGCTGGCTTCAAAGAAAAATCCTAAAC | 1169 |
| Arg75Leu | TCATTAATGCCCTTCGGCGATGTTTTTTCTGGAGATTTATGTT | |
| CGA to CTA | CTATGGAATCTTTTTATATTTAGGGGTAAGGATCTC | |
| | GAGATCCTTACCCCTAAATATAAAAAGATTCCATAGAACATAA | 1170 |
| | ATCTCCAGAAAAAACATCGCCGAAGGGCATTAATGAGTTTAG | |
| | GATTTTTCTTTGAAGCCAGCTCTCTATCCCATTCTC | |
| | CCTTCGGCGATGTTTTT | 1171 |
| | AAAAACATCGCCGAAGG | 1172 |
| Cystic fibrosis | AGAGAATGGGATAGAGAGCTGGCTTCAAAGAAAAATCCTAAA | 1173 |
| Arg75Term | CTCATTAATGCCCTTCGGCGATGTTTTTTCTGGAGATTTATGT | |
| CGA to TGA | TCTATGGAATCTTTTTATATTTAGGGGTAAGGATCT | |
| | AGATCCTTACCCCTAAATATAAAAAGATTCCATAGAACATAAA | 1174 |
| | TCTCCAGAAAAAACATCGCCGAAGGGCATTAATGAGTTTAGG | |
| | ATTTTTCTTTGAAGCCAGCTCTCTATCCCATTCTCT | |
| | CCCTTCGGCGATGTTTT | 1175 |
| | AAAACATCGCCGAAGGG | 1176 |
| Cystic fibrosis | AAAATCCTAAACTCATTAATGCCCTTCGGCGATGTTTTTTCTG | 1177 |
| Gly85Glu | GAGATTTATGTTCTATGGAATCTTTTTATATTTAGGGGTAAGG | |
| GGA to GAA | ATCTCATTTGTACATTCATTATGTATCACATAACT | |
| | AGTTATGTGATACATAATGAATGTACAAATGAGATCCTTACCC | 1178 |
| | CTAAATATAAAAAGATTCCATAGAACATAAATCTCCAGAAAAA | |
| | ACATCGCCGAAGGGCATTAATGAGTTTAGGATTTT | |
| | GTTCTATGGAATCTTTT | 1179 |
| | AAAAGATTCCATAGAAC | 1180 |
| Cystic fibrosis | AAAATCCTAAACTCATTAATGCCCTTCGGCGATGTTTTTTCTG | 1181 |
| G | GAGATTTATGTTCTATGGAATCTTTTTATATTTAGGGGTAAGG | |
| | ATCTCATTTGTACATTCATTATGTATCACATAACT | |
| | AGTTATGTGATACATAATGAATGTACAAATGAGATCCTTACCC | 1182 |
| | CTAAATATAAAAAGATTCCATAGAACATAAATCTCCAGAAAAA | |
| | ACATCGCCGAAGGGCATTAATGAGTTTAGGATTTT | |
| | GTTCTATGGAATCTTTT | 1183 |
| | AAAAGATTCCATAGAAC | 1184 |
| Cystic fibrosis | AACTCATTAATGCCCTTCGGCGATGTTTTTTCTGGAGATTTAT | 1185 |
| Leu88S | GTTCTATGGAATCTTTTTATATTTAGGGGTAAGGATCTCATTT | |
| | GTACATTCATTATGTATCACATAACTATATGCATT | |
| | AATGCATATAGTTATGTGATACATAATGAATGTACAAATGAGA | 1186 |
| | TCCTTACCCCTAAATATAAAAAGATTCCATAGAACATAAATCT | |
| | CCAGAAAAAACATCGCCGAAGGGCATTAATGAGTT | |
| | AATCTTTTTATATTTAG | 1187 |
| | CTAAATATAAAAAGATT | 1188 |
| Cystic fibrosis | CCTAAACTCATTAATGCCCTTCGGCGATGTTTTTTCTGGAGAT | 1189 |
| Phe87Leu | TTATGTTCTATGGAATCTTTTTATATTTAGGGGTAAGGATCTC | |
| TTT to CTT | ATTTGTACATTCATTATGTATCACATAACTATATG | |
| | CATATAGTTATGTGATACATAATGAATGTACAAATGAGATCCT | 1190 |
| | TACCCCTAAATATAAAAAGATTCCATAGAACATAAATCTCCAG | |
| | AAAAAACATCGCCGAAGGGCATTAATGAGTTTAGG | |
| | ATGGAATCTTTTTATAT | 1191 |
| | ATATAAAAAGATTCCAT | 1192 |
| Cystic fibrosis | AACTCATTAATGCCCTTCGGCGATGTTTTTTCTGGAGATTTAT | 1193 |
| Leu88Term | GTTCTATGGAATCTTTTTATATTTAGGGGTAAGGATCTCATTT | |
| TTA to TGA | GTACATTCATTATGTATCACATAACTATATGCATT | |
| | AATGCATATAGTTATGTGATACATAATGAATGTACAAATGAGA | 1194 |
| | TCCTTACCCCTAAATATAAAAAGATTCCATAGAACATAAATCT | |
| | CCAGAAAAAACATCGCCGAAGGGCATTAATGAGTT | |
| | AATCTTTTTATATTTAG | 1195 |
| | CTAAATATAAAAAGATT | 1196 |
| Cystic fibrosis | AACTCATTAATGCCCTTCGGCGATGTTTTTTCTGGAGATTTAT | 1197 |
| Leu88Term | GTTCTATGGAATCTTTTTATATTTAGGGGTAAGGATCTCATTT | |
| TTA to TAA | GTACATTCATTATGTATCACATAACTATATGCATT | |
| | AATGCATATAGTTATGTGATACATAATGAATGTACAAATGAGA | 1198 |
| | TCCTTACCCCTAAATATAAAAAGATTCCATAGAACATAAATCT | |
| | CCAGAAAAAACATCGCCGAAGGGCATTAATGAGTT | |
| | AATCTTTTTATATTTAG | 1199 |
| | CTAAATATAAAAAGATT | 1200 |
| Cystic fibrosis | AATGCCCTTCGGCGATGTTTTTTCTGGAGATTTATGTTCTATG | 1201 |
| Gly91Ar | GAATCTTTTTATATTTAGGGGTAAGGATCTCATTTGTACATTC | |
| | ATTATGTATCACATAACTATATGCATTTTTGTGAT | |
| | ATCACAAAAATGCATATAGTTATGTGATACATAATGAATGTAC | 1202 |
| | AAATGAGATCCTTACCCCTAAATATAAAAAGATTCCATAGAAC | |
| | ATAAATCTCCAGAAAAAACATCGCCGAAGGGCATT | |
| | TATATTTAGGGGTAAGG | 1203 |
| | CCTTACCCCTAAATATA | 1204 |
| Cystic fibrosis | AATAAATGAAATTTAATTTCTCTGTTTTTCCCCTTTTGTAGGAA | 1205 |
| Gln98A | GTCACCAAAGCAGTACAGCCTCTCTTACTGGGAAGAATCATA | |
| | GCTTCCTATGACCCGGATAACAAGGAGGAACGCTC | |
| | GAGCGTTCCTCCTTGTTATCCGGGTCATAGGAAGCTATGATT | 1206 |
| | CTTCCCAGTAAGAGAGGCTGTACTGCTTTGGTGACTTCCTAC | |
| | AAAAGGGGAAAAACAGAGAAATTAAATTTCATTTATT | |
| | AGCAGTACAGCCTCTCT | 1207 |
| | AGAGAGGCTGTACTGCT | 1208 |
| Cystic fibrosis | AAATAAATGAAATTTAATTTCTCTGTTTTTCCCCTTTTGTAGGA | 1209 |
| Gln98Term | AGTCACCAAAGCAGTACAGCCTCTCTTACTGGGAAGAATCAT | |
| CAG-TAG | AGCTTCCTATGACCCGGATAACAAGGAGGAACGCT | |
| | AGCGTTCCTCCTTGTTATCCGGGTCATAGGAAGCTATGATTC | 1210 |
| | TTCCCAGTAAGAGAGGCTGTACTGCTTTGGTGACTTCCTACA | |
| | AAAGGGGAAAAACAGAGAAATTAAATTTCATTTATTT | |
| | AAGCAGTACAGCCTCTC | 1211 |
| | GAGAGGCTGTACTGCTT | 1212 |
| Cystic fibrosis | CCCTTTTGTAGGAAGTCACCAAAGCAGTACAGCCTCTCTTAC | 1213 |
| Ser108Ph | TGGGAAGAATCATAGCTTCCTATGACCCGGATAACAAGGAGG | |
| | AACGCTCTATCGCGATTTATCTAGGCATAGGCTTATG | |
| | CATAAGCCTATGCCTAGATAAATCGCGATAGAGCGTTCCTCC | 1214 |
| | TTGTTATCCGGGTCATAGGAAGCTATGATTCTTCCCAGTAAG | |
| | AGAGGCTGTACTGCTTTGGTGACTTCCTACAAAAGGG | |
| | CATAGCTTCCTATGACC | 1215 |
| | GGTCATAGGAAGCTATG | 1216 |
| Cystic fibrosis | TTTTGTAGGAAGTCACCAAAGCAGTACAGCCTCTCTTACTGG | 1217 |
| Tyr109Cys | GAAGAATCATAGCTTCCTATGACCCGGATAACAAGGAGGAAC | |
| TAT to TGT | GCTCTATCGCGATTTATCTAGGCATAGGCTTATGCCT | |
| | AGGCATAAGCCTATGCCTAGATAAATCGCGATAGAGCGTTCC | 1218 |
| | TCCTTGTTATCCGGGTCATAGGAAGCTATGATTCTTCCCAGT | |
| | AAGAGAGGCTGTACTGCTTTGGTGACTTCCTACAAAA | |
| | AGCTTCCTATGACCCGG | 1219 |
| | CCGGGTCATAGGAAGCT | 1220 |
| Cystic fibrosis | TTGTAGGAAGTCACCAAAGCAGTACAGCCTCTCTTACTGGGA | 1221 |
| Asp110Hi | AGAATCATAGCTTCCTATGACCCGGATAACAAGGAGGAACGC | |
| | TCTATCGCGATTTATCTAGGCATAGGCTTATGCCTTC | |
| | GAAGGCATAAGCCTATGCCTAGATAAATCGCGATAGAGCGTT | 1222 |
| | CCTCCTTGTTATCCGGGTCATAGGAAGCTATGATTCTTCCCA | |
| | GTAAGAGAGGCTGTACTGCTTTGGTGACTTCCTACAA | |
| | CTTCCTATGACCCGGAT | 1223 |
| | ATCCGGGTCATAGGAAG | 1224 |
| Congenital absence | AGGAAGTCACCAAAGCAGTACAGCCTCTCTTACTGGGAAGAA | 1225 |
| of vas deferens | TCATAGCTTCCTATGACCCGGATAACAAGGAGGAACGCTCTA | |
| Pro111Leu | TCGCGATTTATCTAGGCATAGGCTTATGCCTTCTCTT | |
| CCG to CTG | | |
| | AAGAGAAGGCATAAGCCTATGCCTAGATAAATCGCGATAGAG | 1226 |
| | CGTTCCTCCTTGTTATCCGGGTCATAGGAAGCTATGATTCTT | |
| | CCCAGTAAGAGAGGCTGTACTGCTTTGGTGACTTCCT | |
| | CTATGACCCGGATAACA | 1227 |
| | TGTTATCCGGGTCATAG | 1228 |
| Cystic fibrosis | GTACAGCCTCTCTTACTGGGAAGAATCATAGCTTCCTATGAC | 1229 |
| A | CCGGATAACAAGGAGGAACGCTCTATCGCGATTTATCTAGGC | |
| | ATAGGCTTATGCCTTCTCTTTATTGTGAGGACACTGC | |
| | GCAGTGTCCTCACAATAAAGAGAAGGCATAAGCCTATGCCTA | 1230 |
| | GATAAATCGCGATAGAGCGTTCCTCCTTGTTATCCGGGTCAT | |
| | AGGAAGCTATGATTCTTCCCAGTAAGAGAGGCTGTAC | |
| | AGGAGGAACGCTCTATC | 1231 |
| | GATAGAGCGTTCCTCCT | 1232 |
| Cystic fibrosis | TACAGCCTCTCTTACTGGGAAGAATCATAGCTTCCTATGACC | 1233 |
| Arg117H | CGGATAACAAGGAGGAACGCTCTATCGCGATTTATCTAGGCA | |
| | TAGGCTTATGCCTTCTCTTTATTGTGAGGACACTGCT | |
| | AGCAGTGTCCTCACAATAAAGAGAAGGCATAAGCCTATGCCT | 1234 |
| | AGATAAATCGCGATAGAGCGTTCCTCCTTGTTATCCGGGTCA | |
| | TAGGAAGCTATGATTCTTCCCAGTAAGAGAGGCTGTA | |
| | GGAGGAACGCTCTATCG | 1235 |
| | CGATAGAGCGTTCCTCC | 1236 |
| Cystic fibrosis | TACAGCCTCTCTTACTGGGAAGAATCATAGCTTCCTATGACC | 1237 |
| Arg117L | CGGATAACAAGGAGGAACGCTCTATCGCGATTTATCTAGGCA | |
| | TAGGCTTATGCCTTCTCTTTATTGTGAGGACACTGCT | |
| | AGCAGTGTCCTCACAATAAAGAGAAGGCATAAGCCTATGCCT | 1238 |
| | AGATAAATCGCGATAGAGCGTTCCTCCTTGTTATCCGGGTCA | |
| | TAGGAAGCTATGATTCTTCCCAGTAAGAGAGGCTGTA | |
| | GGAGGAACGCTCTATCG | 1239 |
| | CGATAGAGCGTTCCTCC | 1240 |
| Cystic fibrosis | TACAGCCTCTCTTACTGGGAAGAATCATAGCTTCCTATGACC | 1241 |
| Arg117P | CGGATAACAAGGAGGAACGCTCTATCGCGATTTATCTAGGCA | |
| | TAGGCTTATGCCTTCTCTTTATTGTGAGGACACTGCT | |
| | AGCAGTGTCCTCACAATAAAGAGAAGGCATAAGCCTATGCCT | 1242 |
| | AGATAAATCGCGATAGAGCGTTCCTCCTTGTTATCCGGGTCA | |
| | TAGGAAGCTATGATTCTTCCCAGTAAGAGAGGCTGTA | |
| | GGAGGAACGCTCTATCG | 1243 |
| | CGATAGAGCGTTCCTCC | 1244 |
| Cystic fibrosis | CTCTTACTGGGAAGAATCATAGCTTCCTATGACCCGGATAAC | 1245 |
| | AAGGAGGAACGCTCTATCGCGATTTATCTAGGCATAGGCTTA | |
| | TGCCTTCTCTTTATTGTGAGGACACTGCTCCTACACC | |
| | GGTGTAGGAGCAGTGTCCTCACAATAAAGAGAAGGCATAAG | 1246 |
| | CCTATGCCTAGATAAATCGCGATAGAGCGTTCCTCCTTGTTA | |
| | TCCGGGTCATAGGAAGCTATGATTCTTCCCAGTAAGAG | |
| | GCTCTATCGCGATTTAT | 1247 |
| | ATAAATCGCGATAGAGC | 1248 |
| Cystic fibrosis | GGGAAGAATCATAGCTTCCTATGACCCGGATAACAAGGAGG | 1249 |
| Tyr122Te | AACGCTCTATCGCGATTTATCTAGGCATAGGCTTATGCCTTCT | |
| | CTTTATTGTGAGGACACTGCTCCTACACCCAGCCATT | |
| | AATGGCTGGGTGTAGGAGCAGTGTCCTCACAATAAAGAGAA | 1250 |
| | GGCATAAGCCTATGCCTAGATAAATCGCGATAGAGCGTTCCT | |
| | CCTTGTTATCCGGGTCATAGGAAGCTATGATTCTTCCC | |
| | GCGATTTATCTAGGCAT | 1251 |
| | ATGCCTAGATAAATCGC | 1252 |
| Cystic fibrosis | TAGCTTCCTATGACCCGGATAACAAGGAGGAACGCTCTATCG | 1253 |
| | CGATTTATCTAGGCATAGGCTTATGCCTTCTCTTTATTGTGAG | |
| | GACACTGCTCCTACACCCAGCCATTTTTGGCCTTCA | |
| | TGAAGGCCAAAAATGGCTGGGTGTAGGAGCAGTGTCCTCAC | 1254 |
| | AATAAAGAGAAGGCATAAGCCTATGCCTAGATAAATCGCGAT | |
| | AGAGCGTTCCTCCTTGTTATCCGGGTCATAGGAAGCTA | |
| | AGGCATAGGCTTATGCC | 1255 |
| | GGCATAAGCCTATGCCT | 1256 |
| Cystic fibrosis | TCGCGATTTATCTAGGCATAGGCTTATGCCTTCTCTTTATTGT | 1257 |
| H | GAGGACACTGCTCCTACACCCAGCCATTTTTGGCCTTCATCA | |
| | CATTGGAATGCAGATGAGAATAGCTATGTTTAGTTT | |
| | AAACTAAACATAGCTATTCTCATCTGCATTCCAATGTGATGAA | 1258 |
| | GGCCAAAAATGGCTGGGTGTAGGAGCAGTGTCCTCACAATA | |
| | AAGAGAAGGCATAAGCCTATGCCTAGATAAATCGCGA | |
| | GCTCCTACACCCAGCCA | 1259 |
| | TGGCTGGGTGTAGGAGC | 1260 |
| Cystic fibrosis | TTTATCTAGGCATAGGCTTATGCCTTCTCTTTATTGTGAGGAC | 1261 |
| Ala141A | ACTGCTCCTACACCCAGCCATTTTTGGCCTTCATCACATTGG | |
| | AATGCAGATGAGAATAGCTATGTTTAGTTTGATTTA | |
| | TAAATCAAACTAAACATAGCTATTCTCATCTGCATTCCAATGT | 1262 |
| | GATGAAGGCCAAAAATGGCTGGGTGTAGGAGCAGTGTCCTC | |
| | ACAATAAAGAGAAGGCATAAGCCTATGCCTAGATAAA | |
| | ACACCCAGCCATTTTTG | 1263 |
| | CAAAAATGGCTGGGTGT | 1264 |
| Cystic fibrosis | GCCTTCTCTTTATTGTGAGGACACTGCTCCTACACCCAGCCA | 1265 |
| Ile148T | TTTTTGGCCTTCATCACATTGGAATGCAGATGAGAATAGCTAT | |
| | GTTTAGTTTGATTTATAAGAAGGTAATACTTCCTTG | |
| | CAAGGAAGTATTACCTTCTTATAAATCAAACTAAACATAGCTA | 1266 |
| | TTCTCATCTGCATTCCAATGTGATGAAGGCCAAAAATGGCTG | |
| | GGTGTAGGAGCAGTGTCCTCACAATAAAGAGAAGGC | |
| | TCATCACATTGGAATGC | 1267 |
| | GCATTCCAATGTGATGA | 1268 |
| Cystic fibrosis | CTTCTCTTTATTGTGAGGACACTGCTCCTACACCCAGCCATTT | 1269 |
| Gly149Ar | TTGGCCTTCATCACATTGGAATGCAGATGAGAATAGCTATGT | |
| | TTAGTTTGATTTATAAGAAGGTAATACTTCCTTGCA | |
| | TGCAAGGAAGTATTACCTTCTTATAAATCAAACTAAACATAGC | 1270 |
| | TATTCTCATCTGCATTCCAATGTGATGAAGGCCAAAAATGGCT | |
| | GGGTGTAGGAGCAGTGTCCTCACAATAAAGAGAAG | |
| | ATCACATTGGAATGCAG | 1271 |
| | CTGCATTCCAATGTGAT | 1272 |
| Cystic fibrosis | TTTATTGTGAGGACACTGCTCCTACACCCAGCCATTTTTGGC | 1273 |
| GI | CTTCATCACATTGGAATGCAGATGAGAATAGCTATGTTTAGTT | |
| | TGATTTATAAGAAGGTAATACTTCCTTGCACAGGCC | |
| | GGCCTGTGCAAGGAAGTATTACCTTCTTATAAATCAAACTAAA | 1274 |
| | CATAGCTATTCTCATCTGCATTCCAATGTGATGAAGGCCAAAA | |
| | ATGGCTGGGTGTAGGAGCAGTGTCCTCACAATAAA | |
| | TTGGAATGCAGATGAGA | 1275 |
| | TCTCATCTGCATTCCAA | 1276 |
| Cystic fibrosis | AATATATTTGTATTTTGTTTGTTGAAATTATCTAACTTTCCATTT | 1277 |
| | TTCTTTTAGACTTTAAAGCTGTCAAGCCGTGTTCTAGATAAAA | |
| | TAAGTATTGGACAACTTGTTAGTCTCCTTTCCA | |
| | TGGAAAGGAGACTAACAAGTTGTCCAATACTTATTTTATCTAG | 1278 |
| | AACACGGCTTGACAGCTTTAAAGTCTAAAAGAAAAATGGAAA | |
| | GTTAGATAATTTCAACAAACAAAATACAAATATATT | |
| | AGACTTTAAAGCTGTCA | 1279 |
| | TGACAGCTTTAAAGTCT | 1280 |
| Cystic fibrosis | TTATCTAACTTTCCATTTTTCTTTTAGACTTTAAAGCTGTCAAG | 1281 |
| Ile175Val | CCGTGTTCTAGATAAAATAAGTATTGGACAACTTGTTAGTCTC | |
| ATA-GTA | CTTTCCAACAACCTGAACAAATTTGATGAAGTAT | |
| | ATACTTCATCAAATTTGTTCAGGTTGTTGGAAAGGAGACTAAC | 1282 |
| | AAGTTGTCCAATACTTATTTTATCTAGAACACGGCTTGACAGC | |
| | TTTAAAGTCTAAAAGAAAAATGGAAAGTTAGATAA | |
| | TAGATAAAATAAGTATT | 1283 |
| | AATACTTATTTTATCTA | 1284 |
| Cystic fibrosis | TTTCCATTTTTCTTTTAGACTTTAAAGCTGTCAAGCCGTGTTCT | 1285 |
| G | AGATAAAATAAGTATTGGACAACTTGTTAGTCTCCTTTCCAAC | |
| | AACCTGAACAAATTTGATGAAGTATGTACCTATT | |
| | AATAGGTACATACTTCATCAAATTTGTTCAGGTTGTTGGAAAG | 1286 |
| | GAGACTAACAAGTTGTCCAATACTTATTTTATCTAGAACACGG | |
| | CTTGACAGCTTTAAAGTCTAAAAGAAAAATGGAAA | |
| | TAAGTATTGGACAACTT | 1287 |
| | AAGTTGTCCAATACTTA | 1288 |
| Cystic fibrosis | AAGATACAATGACACCTGTTTTTGCTGTGCTTTTATTTTCCAG | 1289 |
| His199G | GGACTTGCATTGGCACATTTCGTGTGGATCGCTCCTTTGCAA | |
| | GTGGCACTCCTCATGGGGCTAATCTGGGAGTTGTTA | |
| | TAACAACTCCCAGATTAGCCCCATGAGGAGTGCCACTTGCAA | 1290 |
| | AGGAGCGATCCACACGAAATGTGCCAATGCAAGTCCCTGGA | |
| | AAATAAAAGCACAGCAAAAACAGGTGTCATTGTATCTT | |
| | TTGGCACATTTCGTGTG | 1291 |
| | CACACGAAATGTGCCAA | 1292 |
| Cystic fibrosis | GGAAGATACAATGACACCTGTTTTTGCTGTGCTTTTATTTTCC | 1293 |
| His199T | AGGGACTTGCATTGGCACATTTCGTGTGGATCGCTCCTTTGC | |
| | AAGTGGCACTCCTCATGGGGCTAATCTGGGAGTTGT | |
| | ACAACTCCCAGATTAGCCCCATGAGGAGTGCCACTTGCAAAG | 1294 |
| | GAGCGATCCACACGAAATGTGCCAATGCAAGTCCCTGGAAA | |
| | ATAAAAGCACAGCAAAAACAGGTGTCATTGTATCTTCC | |
| | CATTGGCACATTTCGTG | 1295 |
| | CACGAAATGTGCCAATG | 1296 |
| Cystic fibrosis | TGTTTTTGCTGTGCTTTTATTTTCCAGGGACTTGCATTGGCAC | 1297 |
| P | ATTTCGTGTGGATCGCTCCTTTGCAAGTGGCACTCCTCATGG | |
| | GGCTAATCTGGGAGTTGTTACAGGCGTCTGCCTTCT | |
| | AGAAGGCAGACGCCTGTAACAACTCCCAGATTAGCCCCATG | 1298 |
| | AGGAGTGCCACTTGCAAAGGAGCGATCCACACGAAATGTGC | |
| | CAATGCAAGTCCCTGGAAAATAAAAGCACAGCAAAAACA | |
| | GGATCGCTCCTTTGCAA | 1299 |
| | TTGCAAAGGAGCGATCC | 1300 |
| Cystic fibrosis | TTTGCTGTGCTTTTATTTTCCAGGGACTTGCATTGGCACATTT | 1301 |
| L | CGTGTGGATCGCTCCTTTGCAAGTGGCACTCCTCATGGGGC | |
| | TAATCTGGGAGTTGTTACAGGCGTCTGCCTTCTGTGG | |
| | CCACAGAAGGCAGACGCCTGTAACAACTCCCAGATTAGCCC | 1302 |
| | CATGAGGAGTGCCACTTGCAAAGGAGCGATCCACACGAAAT | |
| | GTGCCAATGCAAGTCCCTGGAAAATAAAAGCACAGCAAA | |
| | CGCTCCTTTGCAAGTGG | 1303 |
| | CCACTTGCAAAGGAGCG | 1304 |
| Cystic fibrosis | TTCGTGTGGATCGCTCCTTTGCAAGTGGCACTCCTCATGGGG | 1305 |
| Gln220Te | CTAATCTGGGAGTTGTTACAGGCGTCTGCCTTCTGTGGACTT | |
| | GGTTTCCTGATAGTCCTTGCCCTTTTTCAGGCTGGGC | |
| | GCCCAGCCTGAAAAAGGGCAAGGACTATCAGGAAACCAAGT | 1306 |
| | CCACAGAAGGCAGACGCCTGTAACAACTCCCAGATTAGCCC | |
| | CATGAGGAGTGCCACTTGCAAAGGAGCGATCCACACGAA | |
| | AGTTGTTACAGGCGTCT | 1307 |
| | AGACGCCTGTAACAACT | 1308 |
| Cystic f | CCTTTGCAAGTGGCACTCCTCATGGGGCTAATCTGGGAGTTG | 1309 |
| | TTACAGGCGTCTGCCTTCTGTGGACTTGGTTTCCTGATAGTC | |
| | CTTGCCCTTTTTCAGGCTGGGCTAGGGAGAATGATGA | |
| | TCATCATTCTCCCTAGCCCAGCCTGAAAAAGGGCAAGGACTA | 1310 |
| | TCAGGAAACCAAGTCCACAGAAGGCAGACGCCTGTAACAAC | |
| | TCCCAGATTAGCCCCATGAGGAGTGCCACTTGCAAAGG | |
| | CTGCCTTCTGTGGACTT | 1311 |
| | AAGTCCACAGAAGGCAG | 1312 |
| Cystic fibrosis | TGGGGCTAATCTGGGAGTTGTTACAGGCGTCTGCCTTCTGTG | 1313 |
| V | GACTTGGTTTCCTGATAGTCCTTGCCCTTTTTCAGGCTGGGC | |
| | TAGGGAGAATGATGATGAAGTACAGGTAGCAACCTAT | |
| | ATAGGTTGCTACCTGTACTTCATCATCATTCTCCCTAGCCCAG | 1314 |
| | CCTGAAAAAGGGCAAGGACTATCAGGAAACCAAGTCCACAG | |
| | AAGGCAGACGCCTGTAACAACTCCCAGATTAGCCCCA | |
| | CCTGATAGTCCTTGCCC | 1315 |
| | GGGCAAGGACTATCAGG | 1316 |
| Cystic fibrosis | GTTACAGGCGTCTGCCTTCTGTGGACTTGGTTTCCTGATAGT | 1317 |
| Gly239A | CCTTGCCCTTTTTCAGGCTGGGCTAGGGAGAATGATGATGAA | |
| | GTACAGGTAGCAACCTATTTTCATAACTTGAAAGTTT | |
| | AAACTTTCAAGTTATGAAAATAGGTTGCTACCTGTACTTCATC | 1318 |
| | ATCATTCTCCCTAGCCCAGCCTGAAAAAGGGCAAGGACTATC | |
| | AGGAAACCAAGTCCACAGAAGGCAGACGCCTGTAAC | |
| | TTTCAGGCTGGGCTAGG | 1319 |
| | CCTAGCCCAGCCTGAAA | 1320 |

### EXAMPLE 11

### Cyclin-Dependent Kinase Inhibitor 2A - CDKN2A

[0224] The human CDKN2A gene was also designated MTS-1 for multiple tumor suppressor-1 and has been implicated in multiple cancers including, for example, malignant melanoma. Malignant melanoma is a cutaneous neoplasm of melanocytes. Melanomas generally have features of asymmetry, irregular border, variegated color, and diameter greater than 6 mm. The precise cause of melanoma is unknown, but sunlight and heredity are risk factors. Melanoma has been increasing during the past few decades.

[0225] The CDKN2A gene has been found to be homozygously deleted at high frequency in cell lines derived from tumors of lung, breast, brain, bone, skin, bladder, kidney, ovary, and lymphocyte. Melanoma cell lines carried at least one copy of CDKN2A in combination with a deleted allele. Melanoma cell lines that carried at least 1 copy of CDKN2A frequently showed nonsense, missense, or frameshift mutations in the gene. Thus, CDKN2A may rival p53 (see Example 6) in the universality of its involvement in tumorigenesis. The attached table discloses the correcting oligonucleotide base sequences for the CDKN2A oligonucleotides of the invention.

TABLE 13
CDKN2A Mutations and Genome-Correcting Oligos

| Clinical Phenotype & | | SEQ ID |
|---|---|---|
| Mutation | Correcting Oligos | NO: |
| Melanoma | GGGCGGCGGGGAGCAGCATGGAGCCGGCGGCGGGGAGCAG | 1321 |
| Trp15Term | CATGGAGCCTTCGGCTGACTGGCTGGCCACGGCCGCGGCCC | |
| TGG-TAG | GGGGTCGGGTAGAGGAGGTGCGGGCGCTGCTGGAGGCGGG | |
| | CCCGCCTCCAGCAGCGCCCGCACCTCCTCTACCCGACCCCG | 1322 |
| | GGCCGCGGCCGTGGCCAGCCAGTCAGCCGAAGGCTCCATGC | |
| | TGCTCCCCGCCGCCGGCTCCATGCTGCTCCCCGCCGCCC | |
| | GGCTGACTGGCTGGCCA | 1323 |
| | TGGCCAGCCAGTCAGCC | 1324 |
| Melanoma | CGGCGGGGAGCAGCATGGAGCCGGCGGCGGGGAGCAGCAT | 1325 |
| Leu16Pro | GGAGCCTTCGGCTGACTGGCTGGCCACGGCCGCGGCCCGGG | |
| CTG-CCG | GTCGGGTAGAGGAGGTGCGGGCGCTGCTGGAGGCGGGGGC | |
| | GCCCCCGCCTCCAGCAGCGCCCGCACCTCCTCTACCCGACC | 1326 |
| | CCGGGCCGCGGCCGTGGCCAGCCAGTCAGCCGAAGGCTCCA | |
| | TGCTGCTCCCCGCCGCCGGCTCCATGCTGCTCCCCGCCG | |
| | TGACTGGCTGGCCACGG | 1327 |
| | CCGTGGCCAGCCAGTCA | 1328 |
| Melanoma | CGGCGGCGGGGAGCAGCATGGAGCCTTCGGCTGACTGGCTG | 1329 |
| Gly23Asp | GCCACGGCCGCGGCCCGGGGTCGGGTAGAGGAGGTGCGGG | |
| GGT-GAT | CGCTGCTGGAGGCGGGGGCGCTGCCCAACGCACCGAATAG | |
| | CTATTCGGTGCGTTGGGCAGCGCCCCCGCCTCCAGCAGCGC | 1330 |
| | CCGCACCTCCTCTACCCGACCCCGGGCCGCGGCCGTGGCCA | |
| | GCCAGTCAGCCGAAGGCTCCATGCTGCTCCCCGCCGCCG | |
| | GGCCCGGGGTCGGGTAG | 1331 |
| | CTACCCGACCCCGGGCC | 1332 |
| Melanoma | CGGCGGGGAGCAGCATGGAGCCTTCGGCTGACTGGCTGGCC | 1333 |
| Arg24Pro | ACGGCCGCGGCCCGGGGTCGGGTAGAGGAGGTGCGGGCGC | |
| CGG-CCG | TGCTGGAGGCGGGGGCGCTGCCCAACGCACCGAATAGTTA | |
| | TAACTATTCGGTGCGTTGGGCAGCGCCCCCGCCTCCAGCAGC | 1334 |
| | GCCCGCACCTCCTCTACCCGACCCCGGGCCGCGGCCGTGGC | |
| | CAGCCAGTCAGCCGAAGGCTCCATGCTGCTCCCCGCCG | |
| | CCGGGGTCGGGTAGAGG | 1335 |
| | CCTCTACCCGACCCCGG | 1336 |
| Melanoma | CGGCTGACTGGCTGGCCACGGCCGCGGCCCGGGGTCGGGT | 1337 |
| Leu32Pro | AGAGGAGGTGCGGGCGCTGCTGGAGGCGGGGGCGCTGCCC | |
| CTG-CCG | AACGCACCGAATAGTTACGGTCGGAGGCCGATCCAGGTGGG | |
| | CCCACCTGGATCGGCCTCCGACCGTAACTATTCGGTGCGTTG | 1338 |
| | GGCAGCGCCCCCGCCTCCAGCAGCGCCCGCACCTCCTCTAC | |
| | CCGACCCCGGGCCGCGGCCGTGGCCAGCCAGTCAGCCG | |
| | GGCGCTGCTGGAGGCGG | 1339 |
| | CCGCCTCCAGCAGCGCC | 1340 |
| Melanoma | GGCTGGCCACGGCCGCGGCCCGGGGTCGGGTAGAGGAGGT | 1341 |
| Gly35Ala | GCGGGCGCTGCTGGAGGCGGGGGCGCTGCCCAACGCACCG | |
| GGG-GCG | AATAGTTACGGTCGGAGGCCGATCCAGGTGGGTAGAGGGTC | |
| | GACCCTCTACCCACCTGGATCGGCCTCCGACCGTAACTATTC | 1342 |
| | GGTGCGTTGGGCAGCGCCCCCGCCTCCAGCAGCGCCCGCAC | |
| | CTCCTCTACCCGACCCCGGGCCGCGGCCGTGGCCAGCC | |
| | GGAGGCGGGGGCGCTGC | 1343 |
| | GCAGCGCCCCCGCCTCC | 1344 |
| Melanoma | GGTAGAGGAGGTGCGGGCGCTGCTGGAGGCGGGGGCGCTG | 1345 |
| Tyr44Term | CCCAACGCACCGAATAGTTACGGTCGGAGGCCGATCCAGGTG | |
| TACg-TAA | GGTAGAGGGTCTGCAGCGGGAGCAGGGGATGGCGGGCGA | |
| | TCGCCCGCCATCCCCTGCTCCCGCTGCAGACCCTCTACCCAC | 1346 |
| | CTGGATCGGCCTCCGACCGTAACTATTCGGTGCGTTGGGCAG | |
| | CGCCCCCGCCTCCAGCAGCGCCCGCACCTCCTCTACC | |
| | AATAGTTACGGTCGGAG | 1347 |
| | CTCCGACCGTAACTATT | 1348 |
| Melanoma | TCTCCCATACCTGCCCCCACCCTGGCTCTGACCACTCTGCTCT | 1349 |
| Met53Ile | CTCTGGCAGGTCATGATGATGGGCAGCGCCCGCGTGGCGGA | |
| ATGa-ATC | GCTGCTGCTGCTCCACGGCGCGGAGCCCAACTGCGCA | |
| | TGCGCAGTTGGGCTCCGCGCCGTGGAGCAGCAGCAGCTCCG | 1350 |
| | CCACGCGGGCGCTGCCCATCATCATGACCTGCCAGAGAGAG | |
| | CAGAGTGGTCAGAGCCAGGGTGGGGGCAGGTATGGGAGA | |
| | GTCATGATGATGGGCAG | 1351 |
| | CTGCCCATCATCATGAC | 1352 |
| Melanoma | CCCATACCTGCCCCCACCCTGGCTCTGACCACTCTGCTCTCTC | 1353 |
| Met54Ile | TGGCAGGTCATGATGATGGGCAGCGCCCGCGTGGCGGAGCT | |
| ATGg-ATT | GCTGCTGCTCCACGGCGCGGAGCCCAACTGCGCAGAC | |
| | GTCTGCGCAGTTGGGCTCCGCGCCGTGGAGCAGCAGCAGCT | 1354 |
| | CCGCCACGCGGGCGCTGCCCATCATCATGACCTGCCAGAGA | |
| | GAGCAGAGTGGTCAGAGCCAGGGTGGGGGCAGGTATGGG | |
| | ATGATGATGGGCAGCGC | 1355 |
| | GCGCTGCCCATCATCAT | 1356 |
| Melanoma | GCCGGCCCCCACCCTGGCTCTGACCATTCTGTTCTCTCTGGC | 1357 |
| Ser56Ile | AGGTCATGATGATGGGCAGCGCCCGAGTGGCGGAGCTGCTG | |
| AGC-ATC | CTGCTCCACGGCGCGGAGCCCAACTGCGCCGACCCCGC | |
| | GCGGGGTCGGCGCAGTTGGGCTCCGCGCCGTGGAGCAGCA | 1358 |
| | GCAGCTCCGCCACTCGGGCGCTGCCCATCATCATGACCTGCC | |
| | AGAGAGAACAGAATGGTCAGAGCCAGGGTGGGGGCCGGC | |
| | GATGGGCAGCGCCCGAG | 1359 |
| | CTCGGGCGCTGCCCATC | 1360 |
| Melanoma | GGCCCCCACCCTGGCTCTGACCATTCTGTTCTCTCTGGCAGG | 1361 |
| Ala57Val | TCATGATGATGGGCAGCGCCCGAGTGGCGGAGCTGCTGCTG | |
| GCC-GTC | CTCCACGGCGCGGAGCCCAACTGCGCCGACCCCGCCAC | |
| | GTGGCGGGGTCGGCGCAGTTGGGCTCCGCGCCGTGGAGCA | 1362 |
| | GCAGCAGCTCCGCCACTCGGGCGCTGCCCATCATCATGACCT | |
| | GCCAGAGAGAACAGAATGGTCAGAGCCAGGGTGGGGGCC | |
| | GGGCAGCGCCCGAGTGG | 1363 |
| | CCACTCGGGCGCTGCCC | 1364 |
| Melanoma | CCCCCACCCTGGCTCTGACCATTCTGTTCTCTCTGGCAGGTCA | 1365 |
| Arg58Term | TGATGATGGGCAGCGCCCGAGTGGCGGAGCTGCTGCTGCTC | |
| cCGA-TGA | CACGGCGCGGAGCCCAACTGCGCCGACCCCGCCACTC | |
| | GAGTGGCGGGGTCGGCGCAGTTGGGCTCCGCGCCGTGGAG | 1366 |
| | CAGCAGCAGCTCCGCCACTCGGGCGCTGCCCATCATCATGAC | |
| | CTGCCAGAGAGAACAGAATGGTCAGAGCCAGGGTGGGGG | |
| | GCAGCGCCCGAGTGGCG | 1367 |
| | CGCCACTCGGGCGCTGC | 1368 |
| Melanoma | CACCCTGGCTCTGACCATTCTGTTCTCTCTGGCAGGTCATGAT | 1369 |
| Val59Gly | GATGGGCAGCGCCCGAGTGGCGGAGCTGCTGCTGCTCCACG | |
| GTG-GGG | GCGCGGAGCCCAACTGCGCCGACCCCGCCACTCTCAC | |
| | GTGAGAGTGGCGGGGTCGGCGCAGTTGGGCTCCGCGCCGTG | 1370 |
| | GAGCAGCAGCAGCTCCGCCACTCGGGCGCTGCCCATCATCAT | |
| | GACCTGCCAGAGAGAACAGAATGGTCAGAGCCAGGGTG | |
| | CGCCCGAGTGGCGGAGC | 1371 |
| | GCTCCGCCACTCGGGCG | 1372 |
| Melanoma | TCTGACCACTCTGCTCTCTCTGGCAGGTCATGATGATGGGCA | 1373 |
| Leu62Pro | GCGCCCGCGTGGCGGAGCTGCTGCTGCTCCACGGCGCGGAG | |
| CTG-CCG | CCCAACTGCGCAGACCCTGCCACTCTCACCCGACCGGT | |
| | ACCGGTCGGGTGAGAGTGGCAGGGTCTGCGCAGTTGGGCTC | 1374 |
| | CGCGCCGTGGAGCAGCAGCAGCTCCGCCACGCGGGCGCTGC | |
| | CCATCATCATGACCTGCCAGAGAGAGCAGAGTGGTCAGA | |
| | GGCGGAGCTGCTGCTGC | 1375 |
| | GCAGCAGCAGCTCCGCC | 1376 |
| Melanoma | TCTGGCAGGTCATGATGATGGGCAGCGCCCGCGTGGCGGAG | 1377 |
| Ala68Val | CTGCTGCTGCTCCACGGCGCGGAGCCCAACTGCGCAGACCC | |
| GCG-GTG | TGCCACTCTCACCCGACCGGTGCATGATGCTGCCCGGGA | |
| | TCCCGGGCAGCATCATGCACCGGTCGGGTGAGAGTGGCAGG | 1378 |
| | GTCTGCGCAGTTGGGCTCCGCGCCGTGGAGCAGCAGCAGCT | |
| | CCGCCACGCGGGCGCTGCCCATCATCATGACCTGCCAGA | |
| | CCACGGCGCGGAGCCCA | 1379 |
| | TGGGCTCCGCGCCGTGG | 1380 |
| Melanoma | CATGATGATGGGCAGCGCCCGAGTGGCGGAGCTGCTGCTGC | 1381 |
| Asn71Lys | TCCACGGCGCGGAGCCCAACTGCGCCGACCCCGCCACTCTC | |
| AACt-AAA | ACCCGACCCGTGCACGACGCTGCCCGGGAGGGCTTCCTG | |
| | CAGGAAGCCCTCCCGGGCAGCGTCGTGCACGGGTCGGGTGA | 1382 |
| | GAGTGGCGGGGTCGGCGCAGTTGGGCTCCGCGCCGTGGAG | |
| | CAGCAGCAGCTCCGCCACTCGGGCGCTGCCCATCATCATG | |
| | GAGCCCAACTGCGCCGA | 1383 |
| | TCGGCGCAGTTGGGCTC | 1384 |
| Melanoma | TCATGATGATGGGCAGCGCCCGAGTGGCGGAGCTGCTGCTG | 1385 |
| Asn71Ser | CTCCACGGCGCGGAGCCCAACTGCGCCGACCCCGCCACTCT | |
| AAC-AGC | CACCCGACCCGTGCACGACGCTGCCCGGGAGGGCTTCCT | |
| | AGGAAGCCCTCCCGGGCAGCGTCGTGCACGGGTCGGGTGAG | 1386 |
| | AGTGGCGGGGTCGGCGCAGTTGGGCTCCGCGCCGTGGAGCA | |
| | GCAGCAGCTCCGCCACTCGGGCGCTGCCCATCATCATGA | |
| | GGAGCCCAACTGCGCCG | 1387 |
| | CGGCGCAGTTGGGCTCC | 1388 |
| Melanoma | AGCTGCTGCTGCTCCACGGCGCGGAGCCCAACTGCGCCGAC | 1389 |
| Pro81Leu | CCCGCCACTCTCACCCGACCCGTGCACGACGCTGCCCGGGA | |
| CCC-CTC | GGGCTTCCTGGACACGCTGGTGGTGCTGCACCGGGCCGG | |
| | CCGGCCCGGTGCAGCACCACCAGCGTGTCCAGGAAGCCCTC | 1390 |
| | CCGGGCAGCGTCGTGCACGGGTCGGGTGAGAGTGGCGGGG | |
| | TCGGCGCAGTTGGGCTCCGCGCCGTGGAGCAGCAGCAGCT | |
| | CACCCGACCCGTGCACG | 1391 |
| | CGTGCACGGGTCGGGTG | 1392 |
| Melanoma | CTGCTCCACGGCGCGGAGCCCAACTGCGCCGACCCCGCCAC | 1393 |
| Asp84Tyr | TCTCACCCGACCCGTGCACGACGCTGCCCGGGAGGGCTTCCT | |
| cGAC-TAC | GGACACGCTGGTGGTGCTGCACCGGGCCGGGGCGCGGC | |
| | GCCGCGCCCCGGCCCGGTGCAGCACCACCAGCGTGTCCAGG | 1394 |
| | AAGCCCTCCCGGGCAGCGTCGTGCACGGGTCGGGTGAGAGT | |
| | GGCGGGGTCGGCGCAGTTGGGCTCCGCGCCGTGGAGCAG | |
| | CCGTGCACGACGCTGCC | 1395 |
| | GGCAGCGTCGTGCACGG | 1396 |
| Melanoma | CTCCACGGCGCGGAGCCCAACTGCGCCGACCCCGCCACTCT | 1397 |
| Ala85Thr | CACCCGACCCGTGCACGACGCTGCCCGGGAGGGCTTCCTGG | |
| cGCT-ACT | ACACGCTGGTGGTGCTGCACCGGGCCGGGGCGCGGCTGG | |
| | CCAGCCGCGCCCCGGCCCGGTGCAGCACCACCAGCGTGTCC | 1398 |
| | AGGAAGCCCTCCCGGGCAGCGTCGTGCACGGGTCGGGTGAG | |
| | AGTGGCGGGGTCGGCGCAGTTGGGCTCCGCGCCGTGGAG | |
| | TGCACGACGCTGCCCGG | 1399 |
| | CCGGGCAGCGTCGTGCA | 1400 |
| Melanoma | GCGCGGAGCCCAACTGCGCCGACCCCGCCACTCTCACCCGA | 1401 |
| Arg87Pro | CCCGTGCACGACGCTGCCCGGGAGGGCTTCCTGGACACGCT | |
| CGG-CCG | GGTGGTGCTGCACCGGGCCGGGGCGCGGCTGGACGTGCG | |
| | CGCACGTCCAGCCGCGCCCCGGCCCGGTGCAGCACCACCAG | 1402 |
| | CGTGTCCAGGAAGCCCTCCCGGGCAGCGTCGTGCACGGGTC | |
| | GGGTGAGAGTGGCGGGGTCGGCGCAGTTGGGCTCCGCGC | |
| | CGCTGCCCGGGAGGGCT | 1403 |
| | AGCCCTCCCGGGCAGCG | 1404 |
| Melanoma | GGCGCGGAGCCCAACTGCGCCGACCCCGCCACTCTCACCCG | 1405 |
| Arg87Trp | ACCCGTGCACGACGCTGCCCGGGAGGGCTTCCTGGACACGC | |
| cCGG-TGG | TGGTGGTGCTGCACCGGGCCGGGGCGCGGCTGGACGTGC | |
| | GCACGTCCAGCCGCGCCCCGGCCCGGTGCAGCACCACCAGC | 1406 |
| | GTGTCCAGGAAGCCCTCCCGGGCAGCGTCGTGCACGGGTCG | |
| | GGTGAGAGTGGCGGGGTCGGCGCAGTTGGGCTCCGCGCC | |
| | ACGCTGCCCGGGAGGGC | 1407 |
| | GCCCTCCCGGGCAGCGT | 1408 |
| Melanoma | CTCTCACCCGACCGGTGCATGATGCTGCCCGGGAGGGCTTCC | 1409 |
| Leu97Arg | TGGACACGCTGGTGGTGCTGCACCGGGCCGGGGCGCGGCTG | |
| CTG-CGG | GACGTGCGCGATGCCTGGGGTCGTCTGCCCGTGGACTT | |
| | AAGTCCACGGGCAGACGACCCCAGGCATCGCGCACGTCCAG | 1410 |
| | CCGCGCCCCGGCCCGGTGCAGCACCACCAGCGTGTCCAGGA | |
| | AGCCCTCCCGGGCAGCATCATGCACCGGTCGGGTGAGAG | |
| | GGTGGTGCTGCACCGGG | 1411 |
| | CCCGGTGCAGCACCACC | 1412 |
| Melanoma | CCCGACCGGTGCATGATGCTGCCCGGGAGGGCTTCCTGGAC | 1413 |
| Arg99Pro | ACGCTGGTGGTGCTGCACCGGGCCGGGGCGCGGCTGGACGT | |
| CGG-CCG | GCGCGATGCCTGGGGTCGTCTGCCCGTGGACTTGGCCGA | |
| | TCGGCCAAGTCCACGGGCAGACGACCCCAGGCATCGCGCAC | 1414 |
| | GTCCAGCCGCGCCCCGGCCCGGTGCAGCACCACCAGCGTGT | |
| | CCAGGAAGCCCTCCCGGGCAGCATCATGCACCGGTCGGG | |
| | GCTGCACCGGGCCGGGG | 1415 |
| | CCCCGGCCCGGTGCAGC | 1416 |
| Melanoma | CCGGTGCATGATGCTGCCCGGGAGGGCTTCCTGGACACGCT | 1417 |
| Gly101Trp | GGTGGTGCTGCACCGGGCCGGGGCGCGGCTGGACGTGCGC | |
| cGGG-TGG | GATGCCTGGGGTCGTCTGCCCGTGGACTTGGCCGAGGAGC | |
| | GCTCCTCGGCCAAGTCCACGGGCAGACGACCCCAGGCATCG | 1418 |
| | CGCACGTCCAGCCGCGCCCCGGCCCGGTGCAGCACCACCAG | |
| | CGTGTCCAGGAAGCCCTCCCGGGCAGCATCATGCACCGG | |
| | ACCGGGCCGGGGCGCGG | 1419 |
| | CCGCGCCCCGGCCCGGT | 1420 |
| Melanoma | CGGGAGGGCTTCCTGGACACGCTGGTGGTGCTGCACCGGGC | 1421 |
| Arg107Cys | CGGGGCGCGGCTGGACGTGCGCGATGCCTGGGGTCGTCTGC | |
| gCGC-TGC | CCGTGGACTTGGCCGAGGAGCGGGGCCACCGCGACGTTG | |
| | CAACGTCGCGGTGGCCCCGCTCCTCGGCCAAGTCCACGGGC | 1422 |
| | AGACGACCCCAGGCATCGCGCACGTCCAGCCGCGCCCCGGC | |
| | CCGGTGCAGCACCACCAGCGTGTCCAGGAAGCCCTCCCG | |
| | TGGACGTGCGCGATGCC | 1423 |
| | GGCATCGCGCACGTCCA | 1424 |
| Melanoma | CACCGGGCCGGGGCGCGGCTGGACGTGCGCGATGCCTGGG | 1425 |
| Ala118Thr | GCCGTCTGCCCGTGGACCTGGCTGAGGAGCTGGGCCATCGC | |
| gGCT-ACT | GATGTCGCACGGTACCTGCGCGCGGCTGCGGGGGGCACCA | |
| | TGGTGCCCCCCGCAGCCGCGCGCAGGTACCGTGCGACATCG | 1426 |
| | CGATGGCCCAGCTCCTCAGCCAGGTCCACGGGCAGACGGCC | |
| | CCAGGCATCGCGCACGTCCAGCCGCGCCCCGGCCCGGTG | |
| | TGGACCTGGCTGAGGAG | 1427 |
| | CTCCTCAGCCAGGTCCA | 1428 |
| Melanoma | TGCGCGATGCCTGGGGCCGTCTGCCCGTGGACCTGGCTGAG | 1429 |
| Val126Asp | GAGCTGGGCCATCGCGATGTCGCACGGTACCTGCGCGCGGC | |
| GTC-GAC | TGCGGGGGGCACCAGAGGCAGTAACCATGCCCGCATAGA | |
| | TCTATGCGGGCATGGTTACTGCCTCTGGTGCCCCCCGCAGCC | 1430 |
| | GCGCGCAGGTACCGTGCGACATCGCGATGGCCCAGCTCCTC | |
| | AGCCAGGTCCACGGGCAGACGGCCCCAGGCATCGCGCA | |
| | TCGCGATGTCGCACGGT | 1431 |
| | ACCGTGCGACATCGCGA | 1432 |

### EXAMPLE 12

### Adenomatous Polyposis of the Colon—APC

[0226] Adenomatous polyposis of the colon is characterized by adenomatous polyps of the colon and rectum; in extreme cases the bowel is carpeted with a myriad of polyps. This is a viciously premalignant disease with one or more polyps progressing through dysplasia to malignancy in untreated gene carriers with a median age at diagnosis of 40 years.

[0227] Mutations in the APC gene are an initiating event for both familial and sporadic colorectal tumorigenesis and many alleles of the APC gene have been identified. Carcinoma may arise at any age from late childhood through the seventh decade with presenting features including, for example, weight loss and inanition, bowel obstruction, or bloody diarrhea. Cases of new mutation still present in these ways but in areas with well organized registers most other gene carriers are detected. The attached table discloses the correcting oligonucleotide base sequences for the APC oligonucleotides of the invention.

TABLE 14
APC Mutations And Genome-Correcting Oligos

| Clinical Phenotype & | | SEQ ID |
|---|---|---|
| Mutation | Correcting Oligos | NO: |
| Adenomatous polyposis | GGATCTGTATCAAGCCGTTCTGGAGAGTGCAGTCCTGTTCCT | 1433 |
| coli | ATGGGTTCATTTCCAAGAAGAGGGTTTGTAAATGGAAGCAGA | |
| Arg121 Term | GAAAGTACTGGATATTTAGAAGAACTTGAGAAAGAGA | |
| AGA-TGA | TCTCTTTCTCAAGTTCTTCTAAATATCCAGTACTTTCTCTGCTT | 1434 |
| | CCATTTACAAACCCTCTTCTTGGAAATGAACCCATAGGAACAG | |
| | GACTGCACTCTCCAGAACGGCTTGATACAGATCC | |
| | TTCCAAGAAGAGGGTTT | 1435 |
| | AAACCCTCTTCTTGGAA | 1436 |
| Adenomatous polyposis | AAAAAAAAAATAGGTCATTGCTTCTTGCTGATCTTGACAAAGA | 1437 |
| coli | AGAAAAGGAAAAAGACTGGTATTACGCTCAACTTCAGAATCTC | |
| Trp157Term | ACTAAAAGAATAGATAGTCTTCCTTTAACTGAAAA | |
| TGG-TAG | TTTTCAGTTAAAGGAAGACTATCTATTCTTTTAGTGAGATTCTG | 1438 |
| | AAGTTGAGCGTAATACCAGTCTTTTTCCTTTTCTTCTTTGTCAA | |
| | GATCAGCAAGAAGCAATGACCTATTTTTTTTTT | |
| | AAAAGACTGGTATTACG | 1439 |
| | CGTAATACCAGTCTTTT | 1440 |
| Adenomatous polyposis | AAATAGGTCATTGCTTCTTGCTGATCTTGACAAAGAAGAAAAG | 1441 |
| coli | GAAAAAGACTGGTATTACGCTCAACTTCAGAATCTCACTAAAA | |
| Tyr159Term | GAATAGATAGTCTTCCTTTAACTGAAAATGTAAGT | |
| TAC-TAG | ACTTACATTTTCAGTTAAAGGAAGACTATCTATTCTTTTAGTGA | 1442 |
| | GATTCTGAAGTTGAGCGTAATACCAGTCTTTTTCCTTTTCTTCT | |
| | TTGTCAAGATCAGCAAGAAGCAATGACCTATTT | |
| | TGGTATTACGCTCAACT | 1443 |
| | AGTTGAGCGTAATACCA | 1444 |
| Adenomatous polyposis | TTGCTTCTTGCTGATCTTGACAAAGAAGAAAAGGAAAAAGACT | 1445 |
| coli | GGTATTACGCTCAACTTCAGAATCTCACTAAAAGAATAGATAG | |
| Gln163Term | TCTTCCTTTAACTGAAAATGTAAGTAACTGGCAGT | |
| CAG-TAG | ACTGCCAGTTACTTACATTTTCAGTTAAAGGAAGACTATCTATT | 1446 |
| | CTTTTAGTGAGATTCTGAAGTTGAGCGTAATACCAGTCTTTTT | |
| | CCTTTTCTTCTTTGTCAAGATCAGCAAGAAGCAA | |
| | CTCAACTTCAGAATCTC | 1447 |
| | GAGATTCTGAAGTTGAG | 1448 |
| Adenomatous polyposis | CTTGACAAAGAAGAAAAGGAAAAAGACTGGTATTACGCTCAAC | 1449 |
| coli | TTCAGAATCTCACTAAAAGAATAGATAGTCTTCCTTTAACTGAA | |
| Arg168Term | AATGTAAGTAACTGGCAGTACAACTTATTTGAAA | |
| AGA-TGA | TTTCAAATAAGTTGTACTGCCAGTTACTTACATTTTCAGTTAAA | 1450 |
| | GGAAGACTATCTATTCTTTTAGTGAGATTCTGAAGTTGAGCGT | |
| | AATACCAGTCTTTTTCCTTTTCTTCTTTGTCAAG | |
| | TCACTAAAAGAATAGAT | 1451 |
| | ATCTATTCTTTTAGTGA | 1452 |
| Adenomatous polyposis | AAGAAAAGGAAAAAGACTGGTATTACGCTCAACTTCAGAATCT | 1453 |
| coli | CACTAAAAGAATAGATAGTCTTCCTTTAACTGAAAATGTAAGTA | |
| Ser171Ile | ACTGGCAGTACAACTTATTTGAAACTTTAATAAC | |
| AGT-ATT | GTTATTAAAGTTTCAAATAAGTTGTACTGCCAGTTACTTACATT | 1454 |
| | TTCAGTTAAAGGAAGACTATCTATTCTTTTAGTGAGATTCTGAA | |
| | GTTGAGCGTAATACCAGTCTTTTTCCTTTTCTT | |
| | AATAGATAGTCTTCCTT | 1455 |
| | AAGGAAGACTATCTATT | 1456 |
| Adenomatous polyposis | GATTAACGTAAATACAAGATATTGATACTTTTTTATTATTTGTG | 1457 |
| coli | GTTTTAGTTTTCCTTACAAACAGATATGACCAGAAGGCAATTG | |
| Gln181Term | GAATATGAAGCAAGGCAAATCAGAGTTGCGATGG | |
| CAA-TAA | CCATCGCAACTCTGATTTGCCTTGCTTCATATTCCAATTGCCT | 1458 |
| | TCTGGTCATATCTGTTTGTAAGGAAAACTAAAACCACAAATAAT | |
| | AAAAAAGTATCAATATCTTGTATTTACGTTAATC | |
| | TTTCCTTACAAACAGAT | 1459 |
| | ATCTGTTTGTAAGGAAA | 1460 |
| Adenomatous polyposis | CTTTTTTATTATTTGTGGTTTTAGTTTTCCTTACAAACAGATATG | 1461 |
| coli | ACCAGAAGGCAATTGGAATATGAAGCAAGGCAAATCAGAGTT | |
| Glu190Term | GCGATGGAAGAACAACTAGGTACCTGCCAGGATA | |
| GAA-TAA | TATCCTGGCAGGTACCTAGTTGTTCTTCCATCGCAACTCTGAT | 1462 |
| | TTGCCTTGCTTCATATTCCAATTGCCTTCTGGTCATATCTGTTT | |
| | GTAAGGAAAACTAAAACCACAAATAATAAAAAAG | |
| | GGCAATTGGAATATGAA | 1463 |
| | TTCATATTCCAATTGCC | 1464 |
| Adenomatous polyposis | CAATTGGAATATGAAGCAAGGCAAATCAGAGTTGCGATGGAA | 1465 |
| coli | GAACAACTAGGTACCTGCCAGGATATGGAAAAACGAGCACAG | |
| Gln208Term | GTAAGTTACTTGTTTCTAAGTGATAAAACAGCGAAGA | |
| CAG-TAG | TCTTCGCTGTTTTATCACTTAGAAACAAGTAACTTACCTGTGCT | 1466 |
| | CGTTTTTCCATATCCTGGCAGGTACCTAGTTGTTCTTCCATCG | |
| | CAACTCTGATTTGCCTTGCTTCATATTCCAATTG | |
| | GTACCTGCCAGGATATG | 1467 |
| | CATATCCTGGCAGGTAC | 1468 |
| Adenomatous polyposis | GCAAGGCAAATCAGAGTTGCGATGGAAGAACAACTAGGTACC | 1469 |
| coli | TGCCAGGATATGGAAAAACGAGCACAGGTAAGTTACTTGTTTC | |
| Arg213Term | TAAGTGATAAAACAGCGAAGAGCTATTAGGAATAAA | |
| CGA-TGA | TTTATTCCTAATAGCTCTTCGCTGTTTTATCACTTAGAAACAAG | 1470 |
| | TAACTTACCTGTGCTCGTTTTTCCATATCCTGGCAGGTACCTA | |
| | GTTGTTCTTCCATCGCAACTCTGATTTGCCTTGC | |
| | TGGAAAAACGAGCACAG | 1471 |
| | CTGTGCTCGTTTTTCCA | 1472 |
| Adenomatous polyposis | GTTTTATTTTAGCGAAGAATAGCCAGAATTCAGCAAATCGAAA | 1473 |
| coli | AGGACATACTTCGTATACGACAGCTTTTACAGTCCCAAGCAAC | |
| Arg232Term | AGAAGCAGAGGTTAGTAAATTGCCTTTCTTGTTTG | |
| CGA-TGA | CAAACAAGAAAGGCAATTTACTAACCTCTGCTTCTGTTGCTTG | 1474 |
| | GGACTGTAAAAGCTGTCGTATACGAAGTATGTCCTTTTCGATT | |
| | TGCTGAATTCTGGCTATTCTTCGCTAAAATAAAAC | |
| | TTCGTATACGACAGCTT | 1475 |
| | AAGCTGTCGTATACGAA | 1476 |
| Adenomatous polyposis | TTATTTTAGCGAAGAATAGCCAGAATTCAGCAAATCGAAAAGG | 1477 |
| coli | ACATACTTCGTATACGACAGCTTTTACAGTCCCAAGCAACAGA | |
| Gln233Term | AGCAGAGGTTAGTAAATTGCCTTTCTTGTTTGTGG | |
| CAG-TAG | CCACAAACAAGAAAGGCAATTTACTAACCTCTGCTTCTGTTGC | 1478 |
| | TTGGGACTGTAAAAGCTGTCGTATACGAAGTATGTCCTTTTCG | |
| | ATTTGCTGAATTCTGGCTATTCTTCGCTAAAATAA | |
| | GTATACGACAGCTTTTA | 1479 |
| | TAAAAGCTGTCGTATAC | 1480 |
| Adenomatous polyposis | AGAAAGCCTACACCATTTTTGCATGTACTGATGTTAACTCCAT | 1481 |
| coli | CTTAACAGAGGTCATCTCAGAACAAGCATGAAACCGGCTCAC | |
| Gln247Term | ATGATGCTGAGCGGCAGAATGAAGGTCAAGGAGTGG | |
| CAG-TAG | CCACTCCTTGACCTTCATTCTGCCGCTCAGCATCATGTGAGC | 1482 |
| | CGGTTTCATGCTTGTTCTGAGATGACCTCTGTTAAGATGGAGT | |
| | TAACATCAGTACATGCAAAAATGGTGTAGGCTTTCT | |
| | GGTCATCTCAGAACAAG | 1483 |
| | CTTGTTCTGAGATGACC | 1484 |
| Adenomatous polyposis | CAGAACAAGCATGAAACCGGCTCACATGATGCTGAGCGGCAG | 1485 |
| coli | AATGAAGGTCAAGGAGTGGGAGAAATCAACATGGCAACTTCT | |
| Gly267Term | GGTAATGGTCAGGTAAATAAATTATTTTATCATATTT | |
| GGA-TGA | AAATATGATAAAATAATTTATTTACCTGACCATTACCAGAAGTT | 1486 |
| | GCCATGTTGATTTCTCCCACTCCTTGACCTTCATTCTGCCGCT | |
| | CAGCATCATGTGAGCCGGTTTCATGCTTGTTCTG | |
| | AAGGAGTGGGAGAAATC | 1487 |
| | GATTTCTCCCACTCCTT | 1488 |
| Adenomatous polyposis | CTTCAAATAACAAAGCATTATGGTTTATGTTGATTTTATTTTTCA | 1489 |
| coli | GTGCCAGCTCCTGTTGAACATCAGATCTGTCCTGCTGTGTGT | |
| Glu443Term | GTTCTAATGAAACTTTCATTTGATGAAGAGCATA | |
| GAA-TAA | TATGCTCTTCATCAAATGAAAGTTTCATTAGAACACACACAGC | 1490 |
| | AGGACAGATCTGATGTTCAACAGGAGCTGGCACTGAAAAATA | |
| | AAATCAACATAAACCATAATGCTTTGTTATTTGAAG | |
| | CTCCTGTTGAACATCAG | 1491 |
| | CTGATGTTCAACAGGAG | 1492 |
| Adenomatous polyposis | CAGTGCCAGCTCCTGTTGAACATCAGATCTGTCCTGCTGTGT | 1493 |
| coli | GTGTTCTAATGAAACTTTCATTTGATGAAGAGCATAGACATGC | |
| SER457TER | AATGAATGAACTAGGTAAGACAAAAATGTTTTTTAA | |
| TCA-TAA | TTAAAAAACATTTTTGTCTTACCTAGTTCATTCATTGCATGTCT | 1494 |
| | ATGCTCTTCATCAAATGAAAGTTTCATTAGAACACACACAGCA | |
| | GGACAGATCTGATGTTCAACAGGAGCTGGCACTG | |
| | GAAACTTTCATTTGATG | 1495 |
| | CATCAAATGAAAGTTTC | 1496 |
| Adenomatous polyposis | AGTTGTTTTATTTTAGATGATTGTCTTTTTCCTCTTGCCCTTTTT | 1497 |
| coli | AAATTAGGGGGACTACAGGCCATTGCAGAATTATTGCAAGTG | |
| Gln473Term | GACTGTGAAATGTACGGGCTTACTAATGACCACT | |
| CAG-TAG | AGTGGTCATTAGTAAGCCCGTACATTTCACAGTCCACTTGCAA | 1498 |
| | TAATTCTGCAATGGCCTGTAGTCCCCCTAATTTAAAAAGGGCA | |
| | AGAGGAAAAAGACAATCATCTAAAATAAAACAACT | |
| | GGGGACTACAGGCCATT | 1499 |
| | AATGGCCTGTAGTCCCC | 1500 |
| Adenomatous polyposis | TTTTAAATTAGGGGGACTACAGGCCATTGCAGAATTATTGCAA | 1501 |
| coli | GTGGACTGTGAAATGTACGGGCTTACTAATGACCACTACAGT | |
| Tyr486Term | ATTACACTAAGACGATATGCTGGAATGGCTTTGACA | |
| TAC-TAG | TGTCAAAGCCATTCCAGCATATCGTCTTAGTGTAATACTGTAG | 1502 |
| | TGGTCATTAGTAAGCCCGTACATTTCACAGTCCACTTGCAATA | |
| | ATTCTGCAATGGCCTGTAGTCCCCCTAATTTAAAA | |
| | GAAATGTACGGGCTTAC | 1503 |
| | GTAAGCCCGTACATTTC | 1504 |
| Adenomatous polyposis | TTGCAAGTGGACTGTGAAATGTATGGGCTTACTAATGACCACT | 1505 |
| coli | ACAGTATTACACTAAGACGATATGCTGGAATGGCTTTGACAAA | |
| Arg499Term | CTTGACTTTTGGAGATGTAGCCAACAAGGTATGTT | |
| CGA-TGA | AACATACCTTGTTGGCTACATCTCCAAAAGTCAAGTTTGTCAA | 1506 |
| | AGCCATTCCAGCATATCGTCTTAGTGTAATACTGTAGTGGTCA | |
| | TTAGTAAGCCCATACATTTCACAGTCCACTTGCAA | |
| | CACTAAGACGATATGCT | 1507 |
| | AGCATATCGTCTTAGTG | 1508 |
| Adenomatous polyposis | AGTGGACTGTGAAATGTATGGGCTTACTAATGACCACTACAGT | 1509 |
| coli | ATTACACTAAGACGATATGCTGGAATGGCTTTGACAAACTTGA | |
| Tyr500Term | CTTTTGGAGATGTAGCCAACAAGGTATGTTTTTAT | |
| TAT-TAG | ATAAAAACATACCTTGTTGGCTACATCTCCAAAAGTCAAGTTT | 1510 |
| | GTCAAAGCCATTCCAGCATATCGTCTTAGTGTAATACTGTAGT | |
| | GGTCATTAGTAAGCCCATACATTTCACAGTCCACT | |
| | AGACGATATGCTGGAAT | 1511 |
| | ATTCCAGCATATCGTCT | 1512 |
| Adenomatous polyposis | GACAAATTCCAACTCTAATTAGATGACCCATATTCTGTTTCTTA | 1513 |
| coli | CTAGGAATCAACCCTCAAAAGCGTATTGAGTGCCTTATGGAAT | |
| Lys586Term | TTGTCAGCACATTGCACTGAGAATAAAGCTGATA | |
| AAA-TAA | TATCAGCTTTATTCTCAGTGCAATGTGCTGACAAATTCCATAA | 1514 |
| | GGCACTCAATACGCTTTTGAGGGTTGATTCCTAGTAAGAAACA | |
| | GAATATGGGTCATCTAATTAGAGTTGGAATTTGTC | |
| | CAACCCTCAAAAGCGTA | 1515 |
| | TACGCTTTTGAGGGTTG | 1516 |
| Adenomatous polyposis | TAGATGACCCATATTCTGTTTCTTACTAGGAATCAACCCTCAA | 1517 |
| coli | AAGCGTATTGAGTGCCTTATGGAATTTGTCAGCACATTGCACT | |
| Leu592Term | GAGAATAAAGCTGATATATGTGCTGTAGATGGTGC | |
| TTA-TGA | GCACCATCTACAGCACATATATCAGCTTTATTCTCAGTGCAAT | 1518 |
| | GTGCTGACAAATTCCATAAGGCACTCAATACGCTTTTGAGGGT | |
| | TGATTCCTAGTAAGAAACAGAATATGGGTCATCTA | |
| | GAGTGCCTTATGGAATT | 1519 |
| | AATTCCATAAGGCACTC | 1520 |
| Adenomatous polyposis | ATGACCCATATTCTGTTTCTTACTAGGAATCAACCCTCAAAAG | 1521 |
| coli | CGTATTGAGTGCCTTATGGAATTTGTCAGCACATTGCACTGAG | |
| Trp593Term | AATAAAGCTGATATATGTGCTGTAGATGGTGCACT | |
| TGG-TAG | AGTGCACCATCTACAGCACATATATCAGCTTTATTCTCAGTGC | 1522 |
| | AATGTGCTGACAAATTCCATAAGGCACTCAATACGCTTTTGAG | |
| | GGTTGATTCCTAGTAAGAAACAGAATATGGGTCAT | |
| | TGCCTTATGGAATTTGT | 1523 |
| | ACAAATTCCATAAGGCA | 1524 |
| Adenomatous polyposis | TGACCCATATTCTGTTTCTTACTAGGAATCAACCCTCAAAAGC | 1525 |
| coli | GTATTGAGTGCCTTATGGAATTTGTCAGCACATTGCACTGAGA | |
| Trp593Term | ATAAAGCTGATATATGTGCTGTAGATGGTGCACTT | |
| TGG-TGA | AAGTGCACCATCTACAGCACATATATCAGCTTTATTCTCAGTG | 1526 |
| | CAATGTGCTGACAAATTCCATAAGGCACTCAATACGCTTTTGA | |
| | GGGTTGATTCCTAGTAAGAAACAGAATATGGGTCA | |
| | GCCTTATGGAATTTGTC | 1527 |
| | GACAAATTCCATAAGGC | 1528 |
| Adenomatous polyposis | TAAAGCTGATATATGTGCTGTAGATGGTGCACTTGCATTTTTG | 1529 |
| coli | GTTGGCACTCTTACTTACCGGAGCCAGACAAACACTTTAGCC | |
| Tyr622Term | ATTATTGAAAGTGGAGGTGGGATATTACGGAATGTG | |
| TAC-TAA | CACATTCCGTAATATCCCACCTCCACTTTCAATAATGGCTAAA | 1530 |
| | GTGTTTGTCTGGCTCCGGTAAGTAAGAGTGCCAACCAAAAAT | |
| | GCAAGTGCACCATCTACAGCACATATATCAGCTTTA | |
| | CTTACTTACCGGAGCCA | 1531 |
| | TGGCTCCGGTAAGTAAG | 1532 |
| Adenomatous polyposis | GATATATGTGCTGTAGATGGTGCACTTGCATTTTTGGTTGGCA | 1533 |
| coli | CTCTTACTTACCGGAGCCAGACAAACACTTTAGCCATTATTGA | |
| Gln625Term | AAGTGGAGGTGGGATATTACGGAATGTGTCCAGCT | |
| CAG-TAG | AGCTGGACACATTCCGTAATATCCCACCTCCACTTTCAATAAT | 1534 |
| | GGCTAAAGTGTTTGTCTGGCTCCGGTAAGTAAGAGTGCCAAC | |
| | CAAAAATGCAAGTGCACCATCTACAGCACATATATC | |
| | ACCGGAGCCAGACAAAC | 1535 |
| | GTTTGTCTGGCTCCGGT | 1536 |
| Adenomatous polyposis | TAGATGGTGCACTTGCATTTTTGGTTGGCACTCTTACTTACCG | 1537 |
| coli | GAGCCAGACAAACACTTTAGCCATTATTGAAAGTGGAGGTGG | |
| Leu629Term | GATATTACGGAATGTGTCCAGCTTGATAGCTACAAA | |
| TTA-TAA | TTTGTAGCTATCAAGCTGGACACATTCCGTAATATCCCACCTC | 1538 |
| | CACTTTCAATAATGGCTAAAGTGTTTGTCTGGCTCCGGTAAGT | |
| | AAGAGTGCCAACCAAAAATGCAAGTGCACCATCTA | |
| | AAACACTTTAGCCATTA | 1539 |
| | TAATGGCTAAAGTGTTT | 1540 |
| Adenomatous polyposis | GCCATTATTGAAAGTGGAGGTGGGATATTACGGAATGTGTCC | 1541 |
| coli | AGCTTGATAGCTACAAATGAGGACCACAGGTATATATAGAGTT | |
| Glu650Term | TTATATTACTTTTAAAGTACAGAATTCATACTCTCA | |
| GAG-TAG | TGAGAGTATGAATTCTGTACTTTAAAAGTAATATAAAACTCTAT | 1542 |
| | ATATACCTGTGGTCCTCATTTGTAGCTATCAAGCTGGACACAT | |
| | TCCGTAATATCCCACCTCCACTTTCAATAATGGC | |
| | CTACAAATGAGGACCAC | 1543 |
| | GTGGTCCTCATTTGTAG | 1544 |
| Adenomatous polyposis | TGCATGTGGAACTTTGTGGAATCTCTCAGCAAGAAATCCTAAA | 1545 |
| coli | GACCAGGAAGCATTATGGGACATGGGGGCAGTTAGCATGCTC | |
| Trp699Term | AAGAACCTCATTCATTCAAAGCACAAAATGATTGCT | |
| TGG-TGA | AGCAATCATTTTGTGCTTTGAATGAATGAGGTTCTTGAGCATG | 1546 |
| | CTAACTGCCCCCATGTCCCATAATGCTTCCTGGTCTTTAGGAT | |
| | TTCTTGCTGAGAGATTCCACAAAGTTCCACATGCA | |
| | GCATTATGGGACATGGG | 1547 |
| | CCCATGTCCCATAATGC | 1548 |
| Adenomatous polyposis | AAGACCAGGAAGCATTATGGGACATGGGGGCAGTTAGCATGC | 1549 |
| coli | TCAAGAACCTCATTCATTCAAAGCACAAAATGATTGCTATGGG | |
| Ser713Term | AAGTGCTGCAGCTTTAAGGAATCTCATGGCAAATAG | |
| TCA-TGA | CTATTTGCCATGAGATTCCTTAAAGCTGCAGCACTTCCCATAG | 1550 |
| | CAATCATTTTGTGCTTTGAATGAATGAGGTTCTTGAGCATGCT | |
| | AACTGCCCCCATGTCCCATAATGCTTCCTGGTCTT | |
| | CATTCATTCAAAGCACA | 1551 |
| | TGTGCTTTGAATGAATG | 1552 |
| Adenomatous polyposis | GGGGCAGTTAGCATGCTCAAGAACCTCATTCATTCAAAGCAC | 1553 |
| coli | AAAATGATTGCTATGGGAAGTGCTGCAGCTTTAAGGAATCTCA | |
| Ser722Gly | TGGCAAATAGGCCTGCGAAGTACAAGGATGCCAATA | |
| AGT-GGT | TATTGGCATCCTTGTACTTCGCAGGCCTATTTGCCATGAGATT | 1554 |
| | CCTTAAAGCTGCAGCACTTCCCATAGCAATCATTTTGTGCTTT | |
| | GAATGAATGAGGTTCTTGAGCATGCTAACTGCCCC | |
| | CTATGGGAAGTGCTGCA | 1555 |
| | TGCAGCACTTCCCATAG | 1556 |
| Adenomatous polyposis | TCTCCTGGCTCAGCTTGCCATCTCTTCATGTTAGGAAACAAAA | 1557 |
| coli | AGCCCTAGAAGCAGAATTAGATGCTCAGCACTTATCAGAAACT | |
| Leu764Term | TTTGACAATATAGACAATTTAAGTCCCAAGGCATC | |
| TTA-TAA | GATGCCTTGGGACTTAAATTGTCTATATTGTCAAAAGTTTCTG | 1558 |
| | ATAAGTGCTGAGCATCTAATTCTGCTTCTAGGGCTTTTTGTTT | |
| | CCTAACATGAAGAGATGGCAAGCTGAGCCAGGAGA | |
| | AGCAGAATTAGATGCTC | 1559 |
| | GAGCATCTAATTCTGCT | 1560 |
| Adenomatous polyposis | TTAGATGCTCAGCACTTATCAGAAACTTTTGACAATATAGACA | 1561 |
| coli | ATTTAAGTCCCAAGGCATCTCATCGTAGTAAGCAGAGACACA | |
| Ser784Thr | GCAAGTCTCTATGGTGATTATGTTTTTGACACCATC | |
| TCT-ACT | GATGGTGTCAAAAACATAATCACCATAGAGACTTGCTGTGTCT | 1562 |
| | CTGCTTACTACGATGAGATGCCTTGGGACTTAAATTGTCTATA | |
| | TTGTCAAAAGTTTCTGATAAGTGCTGAGCATCTAA | |
| | CCAAGGCATCTCATCGT | 1563 |
| | ACGATGAGATGCCTTGG | 1564 |
| Adenomatous polyposis | CTCATCGTAGTAAGCAGAGACACAGCAAGTCTCTATGGTGATT | 1565 |
| coli | ATGTTTTTGACACCAATCGACATGATGATAATAGGTCAGACAT | |
| Arg805Term | TTTAATACTGGCACATGACTGTCCTTTCACCATAT | |
| CGA-TGA | ATATGGTGAAAGGACAGTCATGTGCCAGTATTAAAATGTCTGA | 1566 |
| | CCTATTATCATCATGTCGATTGGTGTCAAAAACATAATCACCAT | |
| | AGAGACTTGCTGTGTCTCTGCTTACTACGATGAG | |
| | ACACCAATCGACATGAT | 1567 |
| | ATCATGTCGATTGGTGT | 1568 |
| Adenomatous polyposis | GGTCTAGGCAACTACCATCCAGCAACAGAAAATCCAGGAACT | 1569 |
| coli | TCTTCAAAGCGAGGTTTGCAGATCTCCACCACTGCAGCCCAG | |
| Gln879Term | ATTGCCAAAGTCATGGAAGAAGTGTCAGCCATTCATA | |
| CAG-TAG | TATGAATGGCTGACACTTCTTCCATGACTTTGGCAATCTGGGC | 1570 |
| | TGCAGTGGTGGAGATCTGCAAACCTCGCTTTGAAGAAGTTCC | |
| | TGGATTTTCTGTTGCTGGATGGTAGTTGCCTAGACC | |
| | GAGGTTTGCAGATCTCC | 1571 |
| | GGAGATCTGCAAACCTC | 1572 |
| Adenomatous polyposis | TACATTGTGTGACAGATGAGAGAAATGCACTTAGAAGAAGCTC | 1573 |
| coli | TGCTGCCCATACACATTCAAACACTTACAATTTCACTAAGTCG | |
| Ser932Term | GAAAATTCAAATAGGACATGTTCTATGCCTTATGC | |
| TCA-TAA | GCATAAGGCATAGAACATGTCCTATTTGAATTTTCCGACTTAG | 1574 |
| | TGAAATTGTAAGTGTTTGAATGTGTATGGGCAGCAGAGCTTCT | |
| | TCTAAGTGCATTTCTCTCATCTGTCACACAATGTA | |
| | TACACATTCAAACACTT | 1575 |
| | AAGTGTTTGAATGTGTA | 1576 |
| Adenomatous polyposis | TACATTGTGTGACAGATGAGAGAAATGCACTTAGAAGAAGCTC | 1577 |
| coli | TGCTGCCCATACACATTCAAACACTTACAATTTCACTAAGTCG | |
| Ser932Term | GAAAATTCAAATAGGACATGTTCTATGCCTTATGC | |
| TCA-TGA | GCATAAGGCATAGAACATGTCCTATTTGAATTTTCCGACTTAG | 1578 |
| | TGAAATTGTAAGTGTTTGAATGTGTATGGGCAGCAGAGCTTCT | |
| | TCTAAGTGCATTTCTCTCATCTGTCACACAATGTA | |
| | TACACATTCAAACACTT | 1579 |
| | AAGTGTTTGAATGTGTA | 1580 |
| Adenomatous polyposis | GACAGATGAGAGAAATGCACTTAGAAGAAGCTCTGCTGCCCA | 1581 |
| coli | TACACATTCAAACACTTACAATTTCACTAAGTCGGAAAATTCAA | |
| Tyr935Term | ATAGGACATGTTCTATGCCTTATGCCAAATTAGAA | |
| TAC-TAG | TTCTAATTTGGCATAAGGCATAGAACATGTCCTATTTGAATTTT | 1582 |
| | CCGACTTAGTGAAATTGTAAGTGTTTGAATGTGTATGGGCAGC | |
| | AGAGCTTCTTCTAAGTGCATTTCTCTCATCTGTC | |
| | AACACTTACAATTTCAC | 1583 |
| | GTGAAATTGTAAGTGTT | 1584 |
| Adenomatous polyposis | GACAGATGAGAGAAATGCACTTAGAAGAAGCTCTGCTGCCCA | 1585 |
| coli | TACACATTCAAACACTTACAATTTCACTAAGTCGGAAAATTCAA | |
| Tyr935Term | ATAGGACATGTTCTATGCCTTATGCCAAATTAGAA | |
| TAC-TAA | TTCTAATTTGGCATAAGGCATAGAACATGTCCTATTTGAATTTT | 1586 |
| | CCGACTTAGTGAAATTGTAAGTGTTTGAATGTGTATGGGCAGC | |
| | AGAGCTTCTTCTAAGTGCATTTCTCTCATCTGTC | |
| | AACACTTACAATTTCAC | 1587 |
| | GTGAAATTGTAAGTGTT | 1588 |
| Adenomatous polyposis | ACCCTCGATTGAATCCTATTCTGAAGATGATGAAAGTAAGTTT | 1589 |
| coli | TGCAGTTATGGTCAATACCCAGCCGACCTAGCCCATAAAATAC | |
| Tyr1000Term | ATAGTGCAAATCATATGGATGATAATGATGGAGAA | |
| TAC-TAA | TTCTCCATCATTATCATCCATATGATTTGCACTATGTATTTTAT | 1590 |
| | GGGCTAGGTCGGCTGGGTATTGACCATAACTGCAAAACTTAC | |
| | TTTCATCATCTTCAGAATAGGATTCAATCGAGGGT | |
| | GGTCAATACCCAGCCGA | 1591 |
| | TCGGCTGGGTATTGACC | 1592 |
| Adenomatous polyposis | TACCCAGCCGACCTAGCCCATAAAATACATAGTGCAAATCATA | 1593 |
| coli | TGGATGATAATGATGGAGAACTAGATACACCAATAAATTATAG | |
| Glu1020Term | TCTTAAATATTCAGATGAGCAGTTGAACTCTGGAA | |
| GAA-TAA | TTCCAGAGTTCAACTGCTCATCTGAATATTTAAGACTATAATTT | 1594 |
| | ATTGGTGTATCTAGTTCTCCATCATTATCATCCATATGATTTGC | |
| | ACTATGTATTTTATGGGCTAGGTCGGCTGGGTA | |
| | ATGATGGAGAACTAGAT | 1595 |
| | ATCTAGTTCTCCATCAT | 1596 |
| Adenomatous polyposis | ATGAAACCCTCGATTGAATCCTATTCTGAAGATGATGAAAGTA | 1597 |
| coli | AGTTTTGCAGTTATGGTCAATACCCAGCCGACCTAGCCCATAA | |
| Ser1032Term | AATACATAGTGCAAATCATATGGATGATAATGATG | |
| TCA-TAA | CATCATTATCATCCATATGATTTGCACTATGTATTTTATGGGCT | 1598 |
| | AGGTCGGCTGGGTATTGACCATAACTGCAAAACTTACTTTCAT | |
| | CATCTTCAGAATAGGATTCAATCGAGGGTTTCAT | |
| | GTTATGGTCAATACCCA | 1599 |
| | TGGGTATTGACCATAAC | 1600 |
| Adenomatous polyposis | TGAAGATGATGAAAGTAAGTTTTGCAGTTATGGTCAATACCCA | 1601 |
| coli | GCCGACCTAGCCCATAAAATACATAGTGCAAATCATATGGATG | |
| Gln1041Term | ATAATGATGGAGAACTAGATACACCAATAAATTAT | |
| CAA-TAA | ATAATTTATTGGTGTATCTAGTTCTCCATCATTATCATCCATAT | 1602 |
| | GATTTGCACTATGTATTTTATGGGCTAGGTCGGCTGGGTATTG | |
| | ACCATAACTGCAAAACTTACTTTCATCATCTTCA | |
| | GCCCATAAAATACATAG | 1603 |
| | CTATGTATTTTATGGGC | 1604 |
| Adenomatous polyposis | ATAAATTATAGTCTTAAATATTCAGATGAGCAGTTGAACTCTGG | 1605 |
| coli | AAGGCAAAGTCCTTCACAGAATGAAAGATGGGCAAGACCCAA | |
| Gln1045Term | ACACATAATAGAAGATGAAATAAAACAAAGTGAGC | |
| CAG-TAG | GCTCACTTTGTTTTATTTCATCTTCTATTATGTGTTTGGGTCTT | 1606 |
| | GCCCATCTTTCATTCTGTGAAGGACTTTGCCTTCCAGAGTTCA | |
| | ACTGCTCATCTGAATATTTAAGACTATAATTTAT | |
| | GTCCTTCACAGAATGAA | 1607 |
| | TTCATTCTGTGAAGGAC | 1608 |
| Adenomatous polyposis | GAAAGATGGGCAAGACCCAAACACATAATAGAGATGAAATA | 1609 |
| coli | AAACAAAGTGAGCAAAGACAATCAAGGAATCAAAGTACAACTT | |
| Gln1067Term | ATCCTGTTTATACTGAGAGCACTGATGATAAACACC | |
| CAA-TAA | GGTGTTTATCATCAGTGCTCTCAGTATAAACAGGATAAGTTGT | 1610 |
| | ACTTTGATTCCTTGATTGTCTTTGCTCACTTTGTTTTATTTCATC | |
| | TTCTATTATGTGTTTGGGTCTTGCCCATCTTTC | |
| | AGCAAAGACAATCAAGG | 1611 |
| | CCTTGATTGTCTTTGCT | 1612 |
| Adenomatous polyposis | AATAGAAGATGAAATAAAACAAAGTGAGCAAAGACAATCAAGG | 1613 |
| coli | AATCAAAGTACAACTTATCCTGTTTATACTGAGAGCACTGATG | |
| Tyr1075Term | ATAAACACCTCAAGTTCCAACCACATTTTGGACAG | |
| TAT-TAG | CTGTCCAAAATGTGGTTGGAACTTGAGGTGTTTATCATCAGTG | 1614 |
| | CTCTCAGTATAAACAGGATAAGTTGTACTTTGATTCCTTGATT | |
| | GTCTTTGCTCACTTTGTTTTATTTCATCTTCTATT | |
| | ACAACTTATCCTGTTTA | 1615 |
| | TAAACAGGATAAGTTGT | 1616 |
| Adenomatous polyposis | TGATGATAAACACCTCAAGTTCCAACCACATTTTGGACAGCAG | 1617 |
| coli | GAATGTGTTTCTCCATACAGGTCACGGGGAGCCAATGGTTCA | |
| Tyr1102Term | GAAACAAATCGAGTGGGTTCTAATCATGGAATTAAT | |
| TAC-TAG | ATTAATTCCATGATTAGAACCCACTCGATTTGTTTCTGAACCAT | 1618 |
| | TGGCTCCCCGTGACCTGTATGGAGAAACACATTCCTGCTGTC | |
| | CAAAATGTGGTTGGAACTTGAGGTGTTTATCATCA | |
| | TCTCCATACAGGTCACG | 1619 |
| | CGTGACCTGTATGGAGA | 1620 |
| Adenomatous polyposis | AACCACATTTTGGACAGCAGGAATGTGTTTCTCCATACAGGTC | 1621 |
| coli | ACGGGGAGCCAATGGTTCAGAAACAAATCGAGTGGGTTCTAA | |
| Ser1110Term | TCATGGAATTAATCAAAATGTAAGCCAGTCTTTGTG | |
| TCA-TGA | CACAAAGACTGGCTTACATTTTGATTAATTCCATGATTAGAAC | 1622 |
| | CCACTCGATTTGTTTCTGAACCATTGGCTCCCCGTGACCTGTA | |
| | TGGAGAAACACATTCCTGCTGTCCAAAATGTGGTT | |
| | CAATGGTTCAGAAACAA | 1623 |
| | TTGTTTCTGAACCATTG | 1624 |
| Adenomatous polyposis | GGACAGCAGGAATGTGTTTCTCCATACAGGTCACGGGGAGCC | 1625 |
| coli | AATGGTTCAGAAACAAATCGAGTGGGTTCTAATCATGGAATTA | |
| Arg1114Term | ATCAAAATGTAAGCCAGTCTTTGTGTCAAGAAGATG | |
| CGA-TGA | CATCTTCTTGACACAAAGACTGGCTTACATTTTGATTAATTCCA | 1626 |
| | TGATTAGAACCCACTCGATTTGTTTCTGAACCATTGGCTCCCC | |
| | GTGACCTGTATGGAGAAACACATTCCTGCTGTCC | |
| | AAACAAATCGAGTGGGT | 1627 |
| | ACCCACTCGATTTGTTT | 1628 |
| Adenomatous polyposis | GGGTTCTAATCATGGAATTAATCAAAATGTAAGCCAGTCTTTG | 1629 |
| coli | TGTCAAGAAGATGACTATGAAGATGATAAGCCTACCAATTATA | |
| Tyr1135Term | GTGAACGTTACTCTGAAGAAGAACAGCATGAAGAA | |
| TAT-TAG | TTCTTCATGCTGTTCTTCTTCAGAGTAACGTTCACTATAATTGG | 1630 |
| | TAGGCTTATCATCTTCATAGTCATCTTCTTGACACAAAGACTG | |
| | GCTTACATTTTGATTAATTCCATGATTAGAACCC | |
| | GATGACTATGAAGATGA | 1631 |
| | TCATCTTCATAGTCATC | 1632 |
| Adenomatous polyposis | GAAGATGACTATGAAGATGATAAGCCTACCAATTATAGTGAAC | 1633 |
| coli | GTTACTCTGAAGAAGAACAGCATGAAGAAGAAGAGAGACCAA | |
| Gln1152Term | CAAATTATAGCATAAAATATAATGAAGAGAAACGTC | |
| CAG-TAG | GACGTTTCTCTTCATTATATTTTATGCTATAATTTGTTGGTCTC | 1634 |
| | TCTTCTTCTTCATGCTGTTCTTCTTCAGAGTAACGTTCACTATA | |
| | ATTGGTAGGCTTATCATCTTCATAGTCATCTTC | |
| | AAGAAGAACAGCATGAA | 1635 |
| | TTCATGCTGTTCTTCTT | 1636 |
| Adenomatous polyposis | GAAGAAGAGAGACCAACAAATTATAGCATAAAATATAATGAAG | 1637 |
| coli | AGAAACGTCATGTGGATCAGCCTATTGATTATAGTTTAAAATAT | |
| Gln1175Term | GCCACAGATATTCCTTCATCACAGAAACAGTCAT | |
| CAG-TAG | ATGACTGTTTCTGTGATGAAGGAATATCTGTGGCATATTTTAA | 1638 |
| | ACTATAATCAATAGGCTGATCCACATGACGTTTCTCTTCATTAT | |
| | ATTTTATGCTATAATTTGTTGGTCTCTCTTCTTC | |
| | ATGTGGATCAGCCTATT | 1639 |
| | AATAGGCTGATCCACAT | 1640 |
| Adenomatous polyposis | AAGAGAGACCAACAAATTATAGCATAAAATATAATGAAGAGAA | 1641 |
| coli | ACGTCATGTGGATCAGCCTATTGATTATAGTTTAAAATATGCC | |
| Pro1176Leu | ACAGATATTCCTTCATCACAGAAACAGTCATTTTC | |
| CCT-CTT | GAAAATGACTGTTTCTGTGATGAAGGAATATCTGTGGCATATT | 1642 |
| | TTAAACTATAATCAATAGGCTGATCCACATGACGTTTCTCTTCA | |
| | TTATATTTTATGCTATAATTTGTTGGTCTCTCTT | |
| | GGATCAGCCTATTGATT | 1643 |
| | AATCAATAGGCTGATCC | 1644 |
| Adenomatous polyposis | ATAAAATATAATGAAGAGAAACGTCATGTGGATCAGCCTATTG | 1645 |
| coli | ATTATAGTTTAAAATATGCCACAGATATTCCTTCATCACAGAAA | |
| Ala1184Pro | CAGTCATTTTCATTCTCAAAGAGTTCATCTGGAC | |
| GCC-CCC | GTCCAGATGAACTCTTTGAGAATGAAAATGACTGTTTCTGTGA | 1646 |
| | TGAAGGAATATCTGTGGCATATTTTAAACTATAATCAATAGGCT | |
| | GATCCACATGACGTTTCTCTTCATTATATTTTAT | |
| | TAAAATATGCCACAGAT | 1647 |
| | ATCTGTGGCATATTTTA | 1648 |
| Adenomatous polyposis | ATCAGCCTATTGATTATAGTTTAAAATATGCCACAGATATTCCT | 1649 |
| coli | TCATCACAGAAACAGTCATTTTCATTCTCAAAGAGTTCATCTG | |
| Ser1194Term | GACAAAGCAGTAAAACCGAACATATGTCTTCAAG | |
| TCA-TGA | CTTGAAGACATATGTTCGGTTTTACTGCTTTGTCCAGATGAAC | 1650 |
| | TCTTTGAGAATGAAAATGACTGTTTCTGTGATGAAGGAATATC | |
| | TGTGGCATATTTTAAACTATAATCAATAGGCTGAT | |
| | GAAACAGTCATTTTCAT | 1651 |
| | ATGAAAATGACTGTTTC | 1652 |
| Adenomatous polyposis | ATTATAGTTTAAAATATGCCACAGATATTCCTTCATCACAGAAA | 1653 |
| coli | CAGTCATTTTCATTCTCAAAGAGTTCATCTGGACAAAGCAGTA | |
| Ser1198Term | AAACCGAACATATGTCTTCAAGCAGTGAGAATAC | |
| TCA-TGA | GTATTCTCACTGCTTGAAGACATATGTTCGGTTTTACTGCTTT | 1654 |
| | GTCCAGATGAACTCTTTGAGAATGAAAATGACTGTTTCTGTGA | |
| | TGAAGGAATATCTGTGGCATATTTTAAACTATAAT | |
| | TTCATTCTCAAAGAGTT | 1655 |
| | AACTCTTTGAGAATGAA | 1656 |
| Adenomatous polyposis | ACCGAACATATGTCTTCAAGCAGTGAGAATACGTCCACACCTT | 1657 |
| coli | CATCTAATGCCAAGAGGCAGAATCAGCTCCATCCAGTTCTGC | |
| Gln1228Term | ACAGAGTAGAAGTGGTCAGCCTCAAAGGCTGCCACT | |
| CAG-TAG | AGTGGCAGCCTTTGAGGCTGACCACTTCTACTCTGTGCAGAA | 1658 |
| | CTGGATGGAGCTGATTCTGCCTCTTGGCATTAGATGAAGGTG | |
| | TGGACGTATTCTCACTGCTTGAAGACATATGTTCGGT | |
| | CCAAGAGGCAGAATCAG | 1659 |
| | CTGATTCTGCCTCTTGG | 1660 |
| Adenomatous polyposis | CATATGTCTTCAAGCAGTGAGAATACGTCCACACCTTCATCTA | 1661 |
| coli | ATGCCAAGAGGCAGAATCAGCTCCATCCAGTTCTGCACAGAG | |
| Gln1230Term | TAGAAGTGGTCAGCCTCAAAGGCTGCCACTTGCAAG | |
| CAG-TAG | CTTGCAAGTGGCAGCCTTTGAGGCTGACCACTTCTACTCTGT | 1662 |
| | GCAGAACTGGATGGAGCTGATTCTGCCTCTTGGCATTAGATG | |
| | AAGGTGTGGACGTATTCTCACTGCTTGAAGACATATG | |
| | GGCAGAATCAGCTCCAT | 1663 |
| | ATGGAGCTGATTCTGCC | 1664 |
| Adenomatous polyposis | TCAGCTCCATCCAAGTTCTGCACAGAGTAGAAGTGGTCAGCC | 1665 |
| coli | TCAAAAGGCTGCCACTTGCAAAGTTTCTTCTATTAACCAAGAA | |
| Cys1249Term | ACAATACAGACTTATTGTGTAGAAGATACTCCAATA | |
| TGC-TGA | TATTGGAGTATCTTCTACACAATAAGTCTGTATTGTTTCTTGGT | 1666 |
| | TAATAGAAGAAACTTTGCAAGTGGCAGCCTTTTGAGGCTGAC | |
| | CACTTCTACTCTGTGCAGAACTTGGATGGAGCTGA | |
| | GCCACTTGCAAAGTTTC | 1667 |
| | GAAACTTTGCAAGTGGC | 1668 |
| Adenomatous polyposis | AGTTTCTTCTATTAACCAAGAAACAATACAGACTTATTGTGTAG | 1669 |
| coli | AAGATACTCCAATATGTTTTTCAAGATGTAGTTCATTATCATCT | |
| Cys1270Term | TTGTCATCAGCTGAAGATGAAATAGGATGTAAT | |
| TGT-TGA | ATTACATCCTATTTCATCTTCAGCTGATGACAAAGATGATAATG | 1670 |
| | AACTACATCTTGAAAAACATATTGGAGTATCTTCTACACAATAA | |
| | GTCTGTATTGTTTCTTGGTTAATAGAAGAAACT | |
| | CCAATATGTTTTTCAAG | 1671 |
| | CTTGAAAAACATATTGG | 1672 |
| Adenomatous polyposis | AAGAAACAATACAGACTTATTGTGTAGAAGATACTCCAATATG | 1673 |
| coli | TTTTTCAAGATGTAGTTCATTATCATCTTTGTCATCAGCTGAAG | |
| Ser1276Term | ATGAAATAGGATGTAATCAGACGACACAGGAAGC | |
| TCA-TGA | GCTTCCTGTGTCGTCTGATTACATCCTATTTCATCTTCAGCTG | 1674 |
| | ATGACAAAGATGATAATGAACTACATCTTGAAAAACATATTGG | |
| | AGTATCTTCTACACAATAAGTCTGTATTGTTTCTT | |
| | ATGTAGTTCATTATCAT | 1675 |
| | ATGATAATGAACTACAT | 1676 |
| Adenomatous polyposis | GATACTCCAATATGTTTTTCAAGATGTAGTTCATTATCATCTTT | 1677 |
| coli | GTCATCAGCTGAAGATGAAATAGGATGTAATCAGACGACACA | |
| Glu1286Term | GGAAGCAGATTCTGCTAATACCCTGCAAATAGCAG | |
| GAA-TAA | CTGCTATTTGCAGGGTATTAGCAGAATCTGCTTCCTGTGTCGT | 1678 |
| | CTGATTACATCCTATTTCATCTTCAGCTGATGACAAAGATGATA | |
| | ATGAACTACATCTTGAAAAACATATTGGAGTATC | |
| | CTGAAGATGAAATAGGA | 1679 |
| | TCCTATTTCATCTTCAG | 1680 |
| Adenomatous polyposis | TGTAGTTCATTATCATCTTTGTCATCAGCTGAAGATGAAATAG | 1681 |
| coli | GATGTAATCAGACGACACAGGAAGCAGATTCTGCAAATACCC | |
| Gln1294Term | TGCAAATAGCAGAAATAAAAGAAAAGATTGGAACTA | |
| CAG-TAG | TAGTTCCAATCTTTTCTTTTATTTCTGCTATTTGCAGGGTATTA | 1682 |
| | GCAGAATCTGCTTCCTGTGTCGTCTGATTACATCCTATTTCAT | |
| | CTTCAGCTGATGACAAAGATGATAATGAACTACA | |
| | AGACGACACAGGAAGCA | 1683 |
| | TGCTTCCTGTGTCGTCT | 1684 |
| Predisposition to, | TAGGATGTAATCAGACGACACAGGAAGCAGATTCTGCTAATA | 1685 |
| association with, | CCCTGCAAATAGCAGAAATAAAAGAAAAGATTGGAACTAGGTC | |
| colorectal cancer | AGCTGAAGATCCTGTGAGCGAAGTTCCAGCAGTGTC | |
| Ile1307Lys | GACACTGCTGGAACTTCGCTCACAGGATCTTCAGCTGACCTA | 1686 |
| ATA-AAA | GTTCCAATCTTTTCTTTTATTTCTGCTATTTGCAGGGTATTAGC | |
| | AGAATCTGCTTCCTGTGTCGTCTGATTACATCCTA | |
| | AGCAGAAATAAAAGAAA | 1687 |
| | TTTCTTTTATTTCTGCT | 1688 |
| Adenomatous polyposis | CCAAGAAACAATACAGACTTATTGTGTAGAAGATACTCCAATA | 1689 |
| coli | TGTTTTTCAAGATGTAGTTCATTATCATCTTTGTCATCAGCTGA | |
| Glu1309Term | AGATGAAATAGGATGTAATCAGACGACACAGGAA | |
| GAA-TAA | TTCCTGTGTCGTCTGATTACATCCTATTTCATCTTCAGCTGATG | 1690 |
| | ACAAAGATGATAATGAACTACATCTTGAAAAACATATTGGAGT | |
| | ATCTTCTACACAATAAGTCTGTATTGTTTCTTGG | |
| | AGATGTAGTTCATTATC | 1691 |
| | GATAATGAACTACATCT | 1692 |
| Predisposition to | GATTCTGCTAATACCCTGCAAATAGCAGAAATAAAAGAAAAGA | 1693 |
| Colorectal Cancer | TTGGAACTAGGTCAGCTGAAGATCCTGTGAGCGAAGTTCCAG | |
| Glu1317Gln | CAGTGTCACAGCACCCTAGAACCAAATCCAGCAGAC | |
| GAA-CAA | GTCTGCTGGATTTGGTTCTAGGGTGCTGTGACACTGCTGGAA | 1694 |
| | CTTCGCTCACAGGATCTTCAGCTGACCTAGTTCCAATCTTTTC | |
| | TTTTATTTCTGCTATTTGCAGGGTATTAGCAGAATC | |
| | GGTCAGCTGAAGATCCT | 1695 |
| | AGGATCTTCAGCTGACC | 1696 |
| Adenomatous polyposis | AAAGAAAAGATTGGAACTAGGTCAGCTGAAGATCCTGTGAGC | 1697 |
| coli | GAAGTTCCAGCAGTGTCACAGCACCCTAGAACCAAATCCAGC | |
| Gln1328Term | AGACTGCAGGGTTCTAGTTTATCTTCAGAATCAGCCA | |
| CAG-TAG | TGGCTGATTCTGAAGATAAACTAGAACCCTGCAGTCTGCTGG | 1698 |
| | ATTTGGTTCTAGGGTGCTGTGACACTGCTGGAACTTCGCTCA | |
| | CAGGATCTTCAGCTGACCTAGTTCCAATCTTTTCTTT | |
| | CAGTGTCACAGCACCCT | 1699 |
| | AGGGTGCTGTGACACTG | 1700 |
| Adenomatous polyposis | GATCCTGTGAGCGAAGTTCCAGCAGTGTCACAGCACCCTAGA | 1701 |
| coli | ACCAAATCCAGCAGACTGCAGGGTTCTAGTTTATCTTCAGAAT | |
| Gln1338Term | CAGCCAGGCACAAAGCTGTTGAATTTTCTTCAGGAG | |
| CAG-TAG | CTCCTGAAGAAAATTCAACAGCTTTGTGCCTGGCTGATTCTGA | 1702 |
| | AGATAAACTAGAACCCTGCAGTCTGCTGGATTTGGTTCTAGG | |
| | GTGCTGTGACACTGCTGGAACTTCGCTCACAGGATC | |
| | GCAGACTGCAGGGTTCT | 1703 |
| | AGAACCCTGCAGTCTGC | 1704 |
| Adenomatous polyposis | AAGTTCCAGCAGTGTCACAGCACCCTAGAACCAAATCCAGCA | 1705 |
| coli | GACTGCAGGGTTCTAGTTTATCTTCAGAATCAGCCAGGCACA | |
| Leu1342Term | AAGCTGTTGAATTTTCTTCAGGAGCGAAATCTCCCTC | |
| TTA-TAA | GAGGGAGATTTCGCTCCTGAAGAAAATTCAACAGCTTTGTGC | 1706 |
| | CTGGCTGATTCTGAAGATAAACTAGAACCCTGCAGTCTGCTG | |
| | GATTTGGTTCTAGGGTGCTGTGACACTGCTGGAACTT | |
| | TTCTAGTTTATCTTCAG | 1707 |
| | CTGAAGATAAACTAGAA | 1708 |
| Adenomatous polyposis | CAGCACCCTAGAACCAAATCCAGCAGACTGCAGGGTTCTAGT | 1709 |
| coli | TTATCTTCAGAATCAGCCAGGCACAAAGCTGTTGAATTTTCTT | |
| Arg1348Trp | CAGGAGCGAAATCTCCCTCCCGAAAGTGGTGCTCAG | |
| AGG-TGG | CTGAGCACCACTTTCGGGAGGGAGATTTCGCTCCTGAAGAAA | 1710 |
| | ATTCAACAGCTTTGTGCCTGGCTGATTCTGAAGATAAACTAGA | |
| | ACCCTGCAGTCTGCTGGATTTGGTTCTAGGGTGCTG | |
| | AATCAGCCAGGCACAAA | 1711 |
| | TTTGTGCCTGGCTGATT | 1712 |
| Adenomatous polyposis | CTGCAGGGTTCTAGTTTATCTTCAGAATCAGCCAGGCACAAA | 1713 |
| coli | GCTGTTGAATTTTCTTCAGGAGCGAAATCTCCCTCCCGAAAGT | |
| Gly1357Term | GGTGCTCAGACACCCCAAAGTCCACCTGAACACTAT | |
| GGA-TGA | ATAGTGTTCAGGTGGACTTTGGGGTGTCTGAGCACCACTTTC | 1714 |
| | GGGAGGGAGATTTCGCTCCTGAAGAAAATTCAACAGCTTTGT | |
| | GCCTGGCTGATTCTGAAGATAAACTAGAACCCTGCAG | |
| | TTTCTTCAGGAGCGAAA | 1715 |
| | TTTCGCTCCTGAAGAAA | 1716 |
| Adenomatous polyposis | CCAGGCACAAAGCTGTTGAATTTTCTTCAGGAGCGAAATCTCC | 1717 |
| coli | CTCCCGAAAGTGGTGCTCAGACACCCCAAAGTCCACCTGAAC | |
| Gln1367Term | ACTATGTTCAGGAGACCCCACTCATGTTTAGCAGAT | |
| CAG-TAG | ATCTGCTAAACATGAGTGGGGTCTCCTGAACATAGTGTTCAG | 1718 |
| | GTGGACTTTGGGGTGTCTGAGCACCACTTTCGGGAGGGAGAT | |
| | TTCGCTCCTGAAGAAAATTCAACAGCTTTGTGCCTGG | |
| | GTGGTGCTCAGACACCC | 1719 |
| | GGGTGTCTGAGCACCAC | 1720 |
| Adenomatous polyposis | AAAGCTGTTGAATTTTCTTCAGGAGCGAAATCTCCCTCCAAAA | 1721 |
| coli | GTGGTGCTCAGACACCCAAAAGTCCACCTGAACACTATGTTC | |
| Lys1370Term | AGGAGACCCCACTCATGTTTAGCAGATGTACTTCTG | |
| AAA-TAA | CAGAAGTACATCTGCTAAACATGAGTGGGGTCTCCTGAACAT | 1722 |
| | AGTGTTCAGGTGGACTTTBGGGTGTCTGAGCACCACTTTTGG | |
| | AGGGAGATTTCGCTCCTGAAGAAAATTCAACAGCTTT | |
| | AGACACCCBAAAGTCCA | 1723 |
| | TGGACTTTTGGGTGTCT | 1724 |
| Adenomatous polyposis | CACCTGAACACTATGTTCAGGAGACCCCACTCATGTTTAGCA | 1725 |
| coli | GATGTACTTCTGTCAGTTCACTTGATAGTTTTGAGAGTCGTTC | |
| Ser1392Term | GATTGCCAGCTCCGTTCAGAGTGAACCATGCAGTGG | |
| TCA-TAA | CCACTGCATGGTTCACTCTGAACGGAGCTGGCAATCGAACGA | 1726 |
| | CTCTCAAAACTATCAAGTGAACTGACAGAAGTACATCTGCTAA | |
| | ACATGAGTGGGGTCTCCTGAACATAGTGTTCAGGTG | |
| | TGTCAGTTCACTTGATA | 1727 |
| | TATCAAGTGAACTGACA | 1728 |
| Adenomatous polyposis | CACCTGAACACTATGTTCAGGAGACCCCACTCATGTTTAGCA | 1729 |
| coli | GATGTACTTCTGTCAGTTCACTTGATAGTTTTGAGAGTCGTTC | |
| Ser1392Term | GATTGCCAGCTCCGTTCAGAGTGAACCATGCAGTGG | |
| TCA-TGA | CCACTGCATGGTTCACTCTGAACGGAGCTGGCAATCGAACGA | 1730 |
| | CTCTCAAAACTATCAAGTGAACTGACAGAAGTACATCTGCTAA | |
| | ACATGAGTGGGGTCTCCTGAACATAGTGTTCAGGTG | |
| | TGTCAGTTCACTTGATA | 1731 |
| | TATCAAGTGAACTGACA | 1732 |
| Adenomatous polyposis | GTTCAGGAGACCCCACTCATGTTTAGCAGATGTACTTCTGTCA | 1733 |
| coli | GTTCACTTGATAGTTTTGAGAGTCGTTCGATTGCCAGCTCCGT | |
| Glu1397Term | TCAGAGTGAACCATGCAGTGGAATGGTAGGTGGCA | |
| GAG-TAG | TGCCACCTACCATTCCACTGCATGGTTCACTCTGAACGGAGC | 1734 |
| | TGGCAATCGAACGACTCTCAAAACTATCAAGTGAACTGACAGA | |
| | AGTACATCTGCTAAACATGAGTGGGGTCTCCTGAAC | |
| | ATAGTTTTGAGAGTCGT | 1735 |
| | ACGACTCTCAAAACTAT | 1736 |
| Adenomatous polyposis | CAAACCATGCCACCAAGCAGAAGTAAAACACCTCCACCACCT | 1737 |
| coli | CCTCAAACAGCTCAAACCAAGCGAGAAGTACCTAAAAATAAA | |
| Lys1449Term | GCACCTACTGCTGAAAAGAGAGAGAGTGGACCTAAGC | |
| AAG-TAG | GCTTAGGTCCACTCTCTCTCTTTTCAGCAGTAGGTGCTTTATT | 1738 |
| | TTTAGGTACTTCTCGCTTGGTTTGAGCTGTTTGAGGAGGTGGT | |
| | GGAGGTGTTTACTTCTGCTTGGTGGCATGGTTTG | |
| | CTCAAACCAAGCGAGAA | 1739 |
| | TTCTCGCTTGGTTTGAG | 1740 |
| Adenomatous polyposis | ACCATGCCACCAAGCAGAAGTAAAACACCTCCACCACCTCCT | 1741 |
| coli | CAAACAGCTCAAACCAAGCGAGAAGTACCTAAAAATAAAGCA | |
| Arg1450Term | CCTACTGCTGAAAAGAGAGAGAGTGGACCTAAGCAAG | |
| CGA-TGA | CTTGCTTAGGTCCACTCTCTCTCTTTTCAGCAGTAGGTGCTTT | 1742 |
| | ATTTTTAGGTACTTCTCGCTTGGTTTGAGCTGTTTGAGGAGGT | |
| | GGTGGAGGTGTTTTACTTCTGCTTGGTGGCATGGT | |
| | AAACCAAGCGAGAAGTA | 1743 |
| | TACTTCTCGCTTGGTTT | 1744 |
| Adenomatous polyposis | CAGATGCTGATACTTTATTACATTTTGCCACGGAAAGTACTCC | 1745 |
| coli | AGATGGATTTTCTTGTTCATCCAGCCTGAGTGCTCTGAGCCTC | |
| Ser1503Term | GATGAGCCATTTATACAGAAAGATGTGGAATTAAG | |
| TCA-TAA | CTTAATTCCACATCTTTCTGTATAAATGGCTCATCGAGGCTCA | 1746 |
| | GAGCACTCAGGCTGGATGAACAAGAAAATCCATCTGGAGTAC | |
| | TTTCCGTGGCAAAATGTAATAAAGTATCAGCATCTG | |
| | TTCTTGTTCATCCAGCC | 1747 |
| | GGCTGGATGAACAAGAA | 1748 |
| Adenomatous polyposis | CTGAGCCTCGATGAGCCATTTATACAGAAAGATGTGGAATTAA | 1749 |
| coli | GAATAATGCCTCCAGTTCAGGAAAATGACAATGGGAATGAAA | |
| Gln1529Term | CAGAATCAGAGCAGCCTAAAGAATCAAATGAAAACC | |
| CAG-TAG | GGTTTTCATTTGATTCTTTAGGCTGCTCTGATTCTGTTTCATTC | 1750 |
| | CCATTGTCATTTTCCTGAACTGGAGGCATTATTCTTAATTCCAC | |
| | ATCTTTCTGTATAAATGGCTCATCGAGGCTCAG | |
| | CTCCAGTTCAGGAAAAT | 1751 |
| | ATTTTCCTGAACTGGAG | 1752 |
| Adenomatous polyposis | ATGTGGAATTAAGAATAATGCCTCCAGTTCAGGAAAATGACAA | 1753 |
| coli | TGGGAATGAAACAGAATCAGAGCAGCCTAAAGAATCAAATGA | |
| Ser1539Term | AAACCAAGAGAAAGAGGCAGAAAAAACTATTGATTC | |
| TCA-TAA | GAATCAATAGTTTTTTCTGCCTCTTTCTCTTGGTTTTCATTTGA | 1754 |
| | TTCTTTAGGCTGCTCTGATTCTGTTTCATTCCCATTGTCATTTT | |
| | CCTGAACTGGAGGCATTATTCTTAATTCCACAT | |
| | AACAGAATCAGAGCAGC | 1755 |
| | GCTGCTCTGATTCTGTT | 1756 |
| Adenomatous polyposis | AAAACCAAGAGAAAGAGGCAGAAAAAACTATTGATTCTGAAAA | 1757 |
| coli | GGACCTATTAGATGATTCAGATGATGATGATATTGAAATACTA | |
| Ser1567Term | GAAGAATGTATTATTTCTGCCATGCCAACAAAGTC | |
| TCA-TGA | GACTTTGTTGGCATGGCAGAAATAATACATTCTTCTAGTATTTC | 1758 |
| | AATATCATCATCATCTGAATCATCTAATAGGTCCTTTTCAGAAT | |
| | CAATAGTTTTTTCTGCCTCTTTCTCTTGGTTTT | |
| | AGATGATTCAGATGATG | 1759 |
| | CATCATCTGAATCATCT | 1760 |
| Adenomatous polyposis | AGAGAGTTTTCTCAGACAACAAAGATTCAAAGAAACAGAATTT | 1761 |
| coli | GAAAAATAATTCCAAGGACTTCAATGATAAGCTCCCAAATAAT | |
| Asp1822Val | GAAGATAGAGTCAGAGGAAGTTTTGCTTTTGATTC | |
| GAC-GTC | GAATCAAAAGCAAAACTTCCTCTGACTCTATCTTCATTATTTGG | 1762 |
| | GAGCTTATCATTGAAGTCCTTGGAATTATTTTTCAAATTCTGTT | |
| | TCTTTGAATCTTTGTTGTCTGAGAAAACTCTCT | |
| | TTCCAAGGACTTCAATG | 1763 |
| | CATTGAAGTCCTTGGAA | 1764 |
| Adenomatous polyposis | AAAACTGACAGCACAGAATCCAGTGGAACCCAAAGTCCTAAG | 1765 |
| coli | CGCCATTCTGGGTCTTACCTTGTGACATCTGTTTAAAAGAGAG | |
| Leu2839Phe | GAAGAATGAAACTAAGAAAATTCTATGTTAATTACA | |
| CTT-TTT | TGTAATTAACATAGAATTTTCTTAGTTTCATTCTTCCTCTCTTTT | 1766 |
| | AAACAGATGTCACAAGGTAAGACCCAGAATGGCGCTTAGGAC | |
| | TTTGGGTTCCACTGGATTCTGTGCTGTCAGTTTT | |
| | GGTCTTACCTTGTGACA | 1767 |
| | TGTCACAAGGTAAGACC | 1768 |

### EXAMPLE 13

### Parahemophilia—Factor V Deficiency

[0228] Deficiency in clotting Factor V is associated with a lifelong predisposition to thrombosis. The disease typically manifests itself with usually mild bleeding, although bleeding times and clotting times are consistently prolonged. Individuals that are heterozygous for a mutation in Factor V have lowered levels of factor V but probably never have abnormal bleeding. A large number of alleles with a range of presenting symptoms have been identified. The attached table discloses the correcting oligonucleotide base sequences for the Factor V oligonucleotides of the invention.

TABLE 15
Factor V Mutations and Genome-Correcting Oligos

| Clinical Phenotype & | | SEQ ID |
|---|---|---|
| Mutation | Correcting Oligos | NO: |
| Factor V deficiency | TTGACTGAATGCTTATTTTGGCCTGTGTCTCTCCCTCTTTCTCA | 4340 |
| Ala221Val | GATATAACAGTTTGTGCCCATGACCACATCAGCTGGCATCTGC | |
| GCC-GTC | TGGGAATGAGCTCGGGGCCAGAATTATTCTCCAT | |
| | ATGGAGAATAATTCTGGCCCCGAGCTCATTCCCAGCAGATGC | 1769 |
| | CAGCTGATGTGGTCATGGGCACAAACTGTTATATCTGAGAAA | |
| | GAGGGAGAGACACAGGCCAAAATAAGCATTCAGTCAA | |
| | AGTTTGTGCCCATGACC | 1770 |
| | GGTCATGGGCACAAACT | 1771 |
| Thrombosis | TGTCCTAACTCAGCTGGGATGCAGGCTTACATTGACATTAAAA | 1772 |
| Arg306Gly | ACTGCCCAAAGAAAACCAGGAATCTTAAGAAAATAACTCGTGA | |
| AGG-GGG | GCAGAGGCGGCACATGAAGAGGTGGGAATACTTCA | |
| | TGAAGTATTCCCACCTCTTCATGTGCCGCCTCTGCTCACGAGT | 1773 |
| | TATTTTCTTAAGATTCCTGGTTTTCTTTGGGCAGTTTTTAATGT | |
| | CAATGTAAGCCTGCATCCCAGCTGAGTTAGGACA | |
| | AGAAAACCAGGAATCTT | 1774 |
| | AAGATTCCTGGTTTTCT | 1775 |
| Thrombosis | GTCCTAACTCAGCTGGGATGCAGGCTTACATTGACATTAAAAA | 1776 |
| Arg306Thr | CTGCCCAAAGAAAACCAGGAATCTTAAGAAAATAACTCGTGAG | |
| AGG-ACG | CAGAGGCGGCACATGAAGAGGTGGGAATACTTCAT | |
| | ATGAAGTATTCCCACCTCTTCATGTGCCGCCTCTGCTCACGAG | 1777 |
| | TTATTTTCTTAAGATTCCTGGTTTTCTTTGGGCAGTTTTTAATG | |
| | TCAATGTAAGCCTGCATCCCAGCTGAGTTAGGAC | |
| | GAAAACCAGGAATCTTA | 1778 |
| | TAAGATTCCTGGTTTTC | 1779 |
| Increased Risk | CCACAGAAAATGATGCCCAGTGCTTAACAAGACCATACTACAG | 1780 |
| Thrombosis | TGACGTGGACATCATGAGAGACATCGCCTCTGGGCTAATAGG | |
| Arg485Lys | ACTACTTCTAATCTGTAAGAGCAGATCCCTGGACAG | |
| AGA-AAA | CTGTCCAGGGATCTGCTCTTACAGATTAGAAGTAGTCCTATTA | 1781 |
| | GCCCAGAGGCGATGTCTCTCATGATGTCCACGTCACTGTAGT | |
| | ATGGTCTTGTTAAGCACTGGGCATCATTTTCTGTGG | |
| | CATCATGAGAGACATCG | 1782 |
| | CGATGTCTCTCATGATG | 1783 |
| Increased Risk | ACATCGCCTCTGGGCTAATAGGACTACTTCTAATCTGTAAGAG | 1784 |
| Thrombosis | CAGATCCCTGGACAGGCGAGGAATACAGGTATTTTGTCCTTG | |
| Arg506Gln | AAGTAACCTTTCAGAAATTCTGAGAATTTCTTCTGG | |
| CGA-CAA | CCAGAAGAAATTCTCAGAATTTCTGAAAGGTTACTTCAAGGAC | 1785 |
| | AAAATACCTGTATTCCTCGCCTGTCCAGGGATCTGCTCTTACA | |
| | GATTAGAAGTAGTCCTATTAGCCCAGAGGCGATGT | |
| | GGACAGGCGAGGAATAC | 1786 |
| | GTATTCCTCGCCTGTCC | 1787 |
| Factor V Deficiency | GACATCGCCTCTGGGCTAATAGGACTACTTCTAATCTGTAAGA | 1788 |
| Arg506Term | GCAGATCCCTGGACAGGCGAGGAATACAGGTATTTTGTCCTT | |
| CGA-TGA | GAAGTAACCTTTCAGAAATTCTGAGAATTTCTTCTG | |
| | CAGAAGAAATTCTCAGAATTTCTGAAAGGTTACTTCAAGGACA | 1789 |
| | AAATACCTGTATTCCTCGCCTGTCCAGGGATCTGCTCTTACAG | |
| | ATTAGAAGTAGTCCTATTAGCCCAGAGGCGATGTC | |
| | TGGACAGGCGAGGAATA | 1790 |
| | TATTCCTCGCCTGTCCA | 1791 |
| Thrombosis | AGTGATGCTGACTATGATTACCAGAACAGACTGGCTGCAGCA | 1792 |
| Arg712Term | TTAGGAATCAGGTCATTCCGAAACTCATCATTGAATCAGGAAG | |
| CGA-TGA | AAGAAGAGTTCAATCTTACTGCCCTAGCTCTGGAGA | |
| | TCTCCAGAGCTAGGGCAGTAAGATTGAACTCTTCTTCTTCCTG | 1793 |
| | ATTCAATGATGAGTTTCGGAATGACCTGATTCCTAATGCTGCA | |
| | GCCAGTCTGTTCTGGTAATCATAGTCAGCATCACT | |
| | GGTCATTCCGAAACTCA | 1794 |
| | TGAGTTTCGGAATGACC | 1795 |
| Thrombosis | TCAGTCAGACAAACCTTTCCCCAGCCCTCGGTCAGATGCCCA | 1796 |
| His1299Arg | TTTCTCCAGACCTCAGCCATACAACCCTTTCTCTAGACTTCAG | |
| CAT-CGT | CCAGACAAACCTCTCTCCAGAACTCAGTCAAACAAA | |
| | TTTGTTTGACTGAGTTCTGGAGAGAGGTTTGTCTGGCTGAAGT | 1797 |
| | CTAGAGAAAGGGTTGTATGGCTGAGGTCTGGAGAAATGGGCA | |
| | TCTGACCGAGGGCTGGGGAAAGGTTTGTCTGACTGA | |
| | CCTCAGCCATACAACCC | 1798 |
| | GGGTTGTATGGCTGAGG | 1799 |

### EXAMPLE 14

### Hemophilia—Factor VIII Deficiency

[0229] The attached table discloses the correcting oligonucleotide base sequences for the Factor VIII oligonucleotides of the invention.

TABLE 16
Factor VIII Mutations and Genome-Correcting Oligos

| Clinical Phenotype & | | SEQ ID |
|---|---|---|
| Mutation | Correcting Oligos | NO: |
| Haemophilia A | AGCTCTCCACCTGCTTCTTTCTGTGCCTTTTGCGATTCTGCTT | 1800 |
| TyrSCys | TAGTGCCACCAGAAGATACTACCTGGGTGCAGTGGAACTGTC | |
| TAC-TGC | ATGGGACTATATGCAAAGTGATCTCGGTGAGCTGCC | |
| | GGCAGCTCACCGAGATCACTTTGCATATAGTCCCATGACAGT | 1801 |
| | TCCACTGCACCCAGGTAGTATCTTCTGGTGGCACTAAAGCAG | |
| | AATCGCAAAAGGCACAGAAAGAAGCAGGTGGAGAGCT | |
| | CAGAAGATACTACCTGG | 1802 |
| | CCAGGTAGTATCTTCTG | 1803 |
| Haemophilia A | CCACCTGCTTCTTTCTGTGCCTTTTGCGATTCTGCTTTAGTGC | 1804 |
| Leu7Arg | CACCAGAAGATACTACCTGGGTGCAGTGGAACTGTCATGGGA | |
| CTG-CGG | CTATATGCAAAGTGATCTCGGTGAGCTGCCTGTGGA | |
| | TCCACAGGCAGCTCACCGAGATCACTTTGCATATAGTCCCAT | 1805 |
| | GACAGTTCCACTGCACCCAGGTAGTATCTTCTGGTGGCACTA | |
| | AAGCAGAATCGCAAAAGGCACAGAAAGAAGCAGGTGG | |
| | ATACTACCTGGGTGCAG | 1806 |
| | CTGCACCCAee GGTAGTAT | 1807 |
| Haemophilia A | AGTCATGCAAATAGAGCTCTCCACCTGCTTCTTTCTGTGCCTT | 1808 |
| Ser(−1)Arg | TTGCGATTCTGCTTTAGIGCCACCAGAAGATACTACCTGGGT | |
| AGTg-AGG | GCAGTGGAACTGTCATGGGACTATATGCAAAGTGAT | |
| | ATCACTTTGCATATAGTCCCATGACAGTTCCACTGCACCCAGG | 1809 |
| | TAGTATCTTCTGGTGGCACTAAAGCAGAATCGCAAAAGGCAC | |
| | AGAAAGAAGCAGGTGGAGAGCTCTATTTGCATGACT | |
| | TGCTTTAGTGCCACCAG | 1810 |
| | CTGGTGGCACTAAAGCA | 1811 |
| Haemophilia A | CATTTGTAGCAATAAGTCATGCAAATAGAGCTCTCCACCTGCT | 1812 |
| Arg(−5)Term | TCTTTCTGTGCCTTTTGCGATTCTGCTTTAGTGCCACCAGAAG | |
| gCGA-TGA | ATACTACCTGGGTGCAGTGGAACTGTCATGGGACT | |
| | AGTCCCATGACAGTTCCACTGCACCCAGGTAGTATCTTCTGG | 1813 |
| | TGGCACTAAAGCAGAATCGCAAAAGGCACAGAAAGAAGCAG | |
| | GTGGAGAGCTCTATTTGCATGACTTATTGCTACAAATG | |
| | GCCTTTTGCGATTCTGC | 1814 |
| | GCAGAATCGCAAAAGGC | 1815 |
| Haemophilia A | TTCTGTGCCTTTTGCGATTCTGCTTTAGTGCCACCAGAAGATA | 1816 |
| Glu11Val | CTACCTGGGTGCAGTGGAACTGTCATGGGACTATATGCAAAG | |
| GAA-GTA | TGATCTCGGTGAGCTGCCTGTGGACGCAAGGTAAAG | |
| | CTTTACCTTGCGTCCACAGGCAGCTCACCGAGATCACTTTGC | 1817 |
| | ATATAGTCCCATGACAGTTCCACTGCACCCAGGTAGTATCTTC | |
| | TGGTGGCACTAAAGCAGAATCGCAAAAGGCACAGAA | |
| | TGCAGTGGAACTGTCAT | 1818 |
| | ATGACAGTTCCACTGCA | 1819 |
| Haemophilia A | CTTTTGCGATTCTGCTTTAGTGCCACCAGAAGATACTACCTGG | 1820 |
| Trp14Gly | GTGCAGTGGAACTGTCATGGGACTATATGCAAAGTGATCTCG | |
| aTGG-GGG | GTGAGCTGCCTGTGGACGCAAGGTAAAGGCATGTCC | |
| | GGACATGCCTTTACCTTGCGTCCACAGGCAGCTCACCGAGAT | 1821 |
| | CACTTTGCATATAGTCCCATGACAGTTCCACTGCACCCAGGT | |
| | AGTATCTTCTGGTGGCACTAAAGCAGAATCGCAAAAG | |
| | AACTGTCATGGGACTAT | 1822 |
| | ATAGTCCCATGACAGTT | 1823 |
| Haemophilia A | TTCACGCAGATTTCCTCCTAGAGTGCCAAAATCTTTTCCATTC | 1824 |
| Tyr46Term | AACACCTCAGTCGTGTACAAAAAGACTCTGTTTGTAGAATTCA | |
| TACa-TAA | CGGATCACCTTTTCAACATCGCTAAGCCAAGGCCA | |
| | TGGCCTTGGCTTAGCGATGTTGAAAAGGTGATCCGTGAATTC | 1825 |
| | TACAAACAGAGTCTTTTTGTACACGACTGAGGTGTTGAATGGA | |
| | AAAGATTTTGGCACTCTAGGAGGAAATCTGCGTGAA | |
| | GTCGTGTACAAAAAGAC | 1826 |
| | GTCTTTTTGTACACGAC | 1827 |
| Haemophilia A | ATCTTTTCCATTCAACACCTCAGTCGTGTACAAAAAGACTCTG | 1828 |
| Asp56Glu | TTTGTAGAATTCACGGATCACCTTTTCAACATCGCTAAGCCAA | |
| GATc-GAA | GGCCACCCTGGATGGGTAATGAAAACAATGTTGAA | |
| | TTCAACATTGTTTTCATTACCCATCCAGGGTGGCCTTGGCTTA | 1829 |
| | GCGATGTTGAAAAGGTGATCCGTGAATTCTACAAACAGAGTC | |
| | TTTTTGTACACGACTGAGGTGTTGAATGGAAAAGAT | |
| | TTCACGGATCACCTTTT | 1830 |
| | AAAAGGTGATCCGTGAA | 1831 |
| Haemophilia A | TTCTGGAGTACTATCCCCAAGTAACCTTTGGCGGACATCTCAT | 1832 |
| Gly73Val | TCTTACAGGTCTGCTAGGTCCTACCATCCAGGCTGAGGTTTAT | |
| GGT-GTT | GATACAGTGGTCATTACACTTAAGAACATGGCTTC | |
| | GAAGCCATGTTCTTAAGTGTAATGACCACTGTATCATAAACCT | 1833 |
| | CAGCCTGGATGGTAGGACCTAGCAGACCTGTAAGAATGAGAT | |
| | GTCCGCCAAAGGTTACTTGGGGATAGTACTCCAGAA | |
| | TCTGCTAGGTCCTACCA | 1834 |
| | TGGTAGGACCTAGCAGA | 1835 |
| Haemophilia A | CAAGTAACCTTTGGCGGACATCTCATTCTTACAGGTCTGCTAG | 1836 |
| Glu79Lys | GTCCTACCATCCAGGCTGAGGTTTATGATACAGTGGTCATTAC | |
| tGAG-AAG | ACTTAAGAACATGGCTTCCCATCCTGTCAGTCTTC | |
| | GAAGACTGACAGGATGGGAAGCCATGTTCTTAAGTGTAATGA | 1837 |
| | CCACTGTATCATAAACCTCAGCCTGGATGGTAGGACCTAGCA | |
| | GACCTGTAAGAATGAGATGTCCGCCAAAGGTTACTTG | |
| | TCCAGGCTGAGGTTTAT | 1838 |
| | ATAAACCTCAGCCTGGA | 1839 |
| Haemophilia A | TAACCTTTGGCGGACATCTCATTCTTACAGGTCTGCTAGGTCC | 1840 |
| ValSOAsp | TACCATCCAGGCTGAGGTTTATGATACAGTGGTCATTACACTT | |
| GTT-GAT | AAGAACATGGCTTCCCATCCTGTCAGTCTTCATGC | |
| | GCATGAAGACTGACAGGATGGGAAGCCATGTTCTTAAGTGTA | 1841 |
| | ATGACCACTGTATCATAAACCTCAGCCTGGATGGTAGGACCT | |
| | AGCAGACCTGTAAGAATGAGATGTCCGCCAAAGGTTA | |
| | GGCTGAGGTTTATGATA | 1842 |
| | TATCATAAACCTCAGCC | 1843 |
| Haemophilia A | TTGGCGGACATCTCATTCTTACAGGTCTGCTAGGTCCTACCAT | 1844 |
| Asp82Val | CCAGGCTGAGGTTTATGATACAGTGGTCATTACACTTAAGAA | |
| GAT-GTT | CATGGCTTCCCATCCTGTCAGTCTTCATGCTGTTGG | |
| | CCAACAGCATGAAGACTGACAGGATGGGAAGCCATGTTCTTA | 1845 |
| | AGTGTAATGACCACTGTATCATAAACCTCAGCCTGGATGGTA | |
| | GGACCTAGCAGACCTGTAAGAATGAGATGTCCGCCAA | |
| | GGTTTATGATACAGTGG | 1846 |
| | CCACTGTATCATAAACC | 1847 |
| Haemophilia A | TTGGCGGACATCTCATTCTTACAGGTCTGCTAGGTCCTACCAT | 1848 |
| Asp82Gly | CCAGGCTGAGGTTTATGATACAGTGGTCATTACACTTAAGAA | |
| GAT-GGT | CATGGCTTCCCATCCTGTCAGTCTTCATGCTGTTGG | |
| | CCAACAGCATGAAGACTGACAGGATGGGAAGCCATGTTCTTA | 1849 |
| | AGTGTAATGACCACTGTATCATAAACCTCAGCCTGGATGGTA | |
| | GGACCTAGCAGACCTGTAAGAATGAGATGTCCGCCAA | |
| | GGTTTATGATACAGTGG | 1850 |
| | CCACTGTATCATAAACC | 1851 |
| Haemophilia A | ATCTCATTCTTACAGGTCTGCTAGGTCCTACCATCCAGGCTGA | 1852 |
| Val85Asp | GGTTTATGATACAGTGGTCATTACACTTAAGAACATGGCTTCC | |
| GTC-GAC | CATCCTGTCAGTCTTCATGCTGTTGGTGTATCCTA | |
| | TAGGATACACCAACAGCATGAAGACTGACAGGATGGGAAGCC | 1853 |
| | ATGTTCTTAAGTGTAATGACCACTGTATCATAAACCTCAGCCT | |
| | GGATGGTAGGACCTAGCAGACCTGTAAGAATGAGAT | |
| | TACAGTGGTCATTACAC | 1854 |
| | GTGTAATGACCACTGTA | 1855 |
| Haemophilia A | CAGGTCTGCTAGGTCCTACCATCCAGGCTGAGGTTTATGATAT | 1856 |
| Lys89Thr | CAGTGGTCATTACACTTAAGAACATGGCTTCCCATCCTGTCAG | |
| AAG-ACG | TCTTCATGCTGTTGGTGTATCCTACTGGAAAGCTTC | |
| | GAAGCTTTCCAGTAGGATACACCAACAGCATGAAGACTGACA | 1857 |
| | GGATGGGAAGCCATGTTCTTAAGTGTAATGACCACTGTATCAT | |
| | AAACCTCAGCCTGGATGGTAGGACCTAGCAGACCTG | |
| | TACACTTAAGAACATGG | 1858 |
| | CCATGTTCTTAAGTGTA | 1859 |
| Haemophilia A | CTGCTAGGTCCTACCATCCAGGCTGAGGTTTATGATACAGTG | 1860 |
| Met91Val | GTCATTACACTTAAGAACATGGCTTCCCATCCTGTCAGTCTTC | |
| cATG-GTG | ATGCTGTTGGTGTATCCTACTGGAAAGCTTCTGAGG | |
| | CCTCAGAAGCTTTCCAGTAGGATACACCAACAGCATGAAGAC | 1861 |
| | TGACAGGATGGGAAGCCATGTTCTTAAGTGTAATGACCACTG | |
| | TATCATAAACCTCAGCCTGGATGGTAGGACCTAGCAG | |
| | TTAAGAACATGGCTTCC | 1862 |
| | GGAAGCCATGTTCTTAA | 1863 |
| Haemophilia A | CTACCATCCAGGCTGAGGTTTATGATACAGTGGTCATTACACT | 1864 |
| His94Arg | TAAGAACATGGCTTCCCATCCTGTCAGTCTTCATGCTGTTGGT | |
| CAT-CGT | GTATCCTACTGGAAAGCTTCTGAGGGTGAGTAAAA | |
| | TTTTACTCACCCTCAGAAGCTTTCCAGTAGGATACACCAACAG | 1865 |
| | CATGAAGACTGACAGGATGGGAAGCCATGTTCTTAAGTGTAA | |
| | TGACCACTGTATCATAAACCTCAGCCTGGATGGTAG | |
| | GGCTTCCCATCCTGTCA | 1866 |
| | TGACAGGATGGGAAGCC | 1867 |
| Haemophilia A | CCTACCATCCAGGCTGAGGTTTATGATACAGTGGTCATTACAC | 1868 |
| His94Tyr | TTAAGAACATGGCTTCCCATCCTGTCAGTCTTCATGCTGTTGG | |
| cCAT-TAT | TGTATCCTACTGGAAAGCTTCTGAGGGTGAGTAAA | |
| | TTTACTCACCCTCAGAAGCTTTCCAGTAGGATACACCAACAGC | 1869 |
| | ATGAAGACTGACAGGATGGGAAGCCATGTTCTTAAGTGTAAT | |
| | GACCACTGTATCATAAACCTCAGCCTGGATGGTAGG | |
| | TGGCTTCCCATCCTGTC | 1870 |
| | GACAGGATGGGAAGCCA | 1871 |
| Haemophilia A | CTGAGGTTTATGATACAGTGGTCATTACACTTAAGAACATGGC | 1872 |
| Leu98Arg | TTCCCATCCTGTCAGTCTTCATGCTGTTGGTGTATCCTACTGG | |
| CTT-CGT | AAAGCTTCTGAGGGTGAGTAAAATACCCTCCTATT | |
| | AATAGGAGGGTATTTTACTCACCCTCAGAAGCTTTCCAGTAG | 1873 |
| | GATACACCAACAGCATGAAGACTGACAGGATGGGAAGCCAT | |
| | GTTCTTAAGTGTAATGACCACTGTATCATAAACCTCAG | |
| | TGTCAGTCTTCATGCTG | 1874 |
| | CAGCATGAAGACTGACA | 1875 |
| Haemophilia A | GATACAGTGGTCATTACACTTAAGAACATGGCTTCCCATCCTG | 1876 |
| Gly102Ser | TCAGTCTTCATGCTGTTGGTGTATCCTACTGGAAAGCTTCTGA | |
| tGGT-AGT | GGGTGAGTAAAATACCCTCCTATTGTCCTGTCATT | |
| | AATGACAGGACAATAGGAGGGTATTTTACTCACCCTCAGAAG | 1877 |
| | CTTTCCAGTAGGATACACCAACAGCATGAAGACTGACAGGAT | |
| | GGGAAGCCATGTTCTTAAGTGTAATGACCACTGTATC | |
| | ATGCTGTTGGTGTATCC | 1878 |
| | GGATACACCAACAGCAT | 1879 |
| Haemophilia A | CTTTGAGTGTACAGTGGATATAGAAAGGACAATTTTATTTCTT | 1880 |
| Glu113Asp | CCTGCTATAGGAGCTGAATATGATGATCAGACCAGTCAAAGG | |
| GAAt-GAC | GAGAAAGAAGATGATAAAGTCTTCCCTGGTGGAAGC | |
| | GCTTCCACCAGGGAAGACTTTATCATCTTCTTTCTCCCTTTGA | 1881 |
| | CTGGTCTGATCATCATATTCAGCTCCTATAGCAGGAAGAAATA | |
| | AAATTGTCCTTTCTATATCCACTGTACACTCAAAG | |
| | GGAGCTGAATATGATGA | 1882 |
| | TCATCATATTCAGCTCC | 1883 |
| Haemophilia A | TTGAGTGTACAGTGGATATAGAAAGGACAATTTTATTTCTTCC | 1884 |
| Tyr114Cys | TGCTATAGGAGCTGAATATGATGATCAGACCAGTCAAAGGGA | |
| TAT-TGT | GAAAGAAGATGATAAAGTCTTCCCTGGTGGAAGCCA | |
| | TGGCTTCCACCAGGGAAGACTTTATCATCTTCTTTCTCCCTTT | 1885 |
| | GACTGGTCTGATCATCATATTCAGCTCCTATAGCAGGAAGAAA | |
| | TAAAATTGTCCTTTCTATATCCACTGTACACTCAA | |
| | AGCTGAATATGATGATC | 1886 |
| | GATCATCATATTCAGCT | 1887 |
| Haemophilia A | GTACAGTGGATATAGAAAGGACAATTTTATTTCTTCCTGCTAT | 1888 |
| Asp116Gly | AGGAGCTGAATATGATGATCAGACCAGTCAAAGGGAGAAAGA | |
| GAT-GGT | AGATGATAAAGTCTTCCCTGGTGGAAGCCATACATA | |
| | TATGTATGGCTTCCACCAGGGAAGACTTTATCATCTTCTTTCT | 1889 |
| | CCCTTTGACTGGTCTGATCATCATATTCAGCTCCTATAGCAGG | |
| | AAGAAATAAAATTGTCCTTTCTATATCCACTGTAC | |
| | ATATGATGATCAGACCA | 1890 |
| | TGGTCTGATCATCATAT | 1891 |
| Haemophilia A | ACAGTGGATATAGAAAGGACAATTTTATTTCTTCCTGCTATAG | 1892 |
| Gin117Term | GAGCTGAATATGATGATCAGACCAGTCAAAGGGAGAAAGAAG | |
| tCAG-TAG | ATGATAAAGTCTTCCCTGGTGGAAGCCATACATATG | |
| | CATATGTATGGCTTCCACCAGGGAAGACTTTATCATCTTCTTT | 1893 |
| | CTCCCTTTGACTGGTCTGATCATCATATTCAGCTCCTATAGCA | |
| | GGAAGAAATAAAATTGTCCTTTCTATATCCACTGT | |
| | ATGATGATCAGACCAGT | 1894 |
| | ACTGGTCTGATCATCAT | 1895 |
| Haemophilia A | TGGATATAGAAAGGACAATTTTATTTCTTCCTGCTATAGGAGC | 1896 |
| Thr118Ile | TGAATATGATGATCAGACCAGTCAAAGGGAGAAAGAAGATGA | |
| ACC-ATC | TAAAGTCTTCCCTGGTGGAAGCCATACATATGTCTG | |
| | CAGACATATGTATGGCTTCCACCAGGGAAGACTTTATCATCTT | 1897 |
| | CTTTCTCCCTTTGACTGGTCTGATCATCATATTCAGCTCCTATA | |
| | GCAGGAAGAAATAAAATTGTCCTTTCTATATCCA | |
| | TGATCAGACCAGTCAAA | 1898 |
| | TTTGACTGGTCTGATCA | 1899 |
| Haemophilia A | AGGACAATTTTATTTCTTCCTGCTATAGGAGCTGAATATGATG | 1900 |
| Glu122Term | ATCAGACCAGTCAAAGGGAGAAAGAAGATGATAAAGTCTTCC | |
| gGAG-TAG | CTGGTGGAAGCCATACATATGTCTGGCAGGTCCTGA | |
| | TCAGGACCTGCCAGACATATGTATGGCTTCCACCAGGGAAGA | 1901 |
| | CTTTATCATCTTCTTTCTCCCTTTGACTGGTCTGATCATCATAT | |
| | TCAGCTCCTATAGCAGGAAGAAATAAAATTGTCCT | |
| | GTCAAAGGGAGAAAGAA | 1902 |
| | TTCTTTCTCCCTTTGAC | 1903 |
| Haemophilia A | TTTCTTCCTGCTATAGGAGCTGAATATGATGATCAGACCAGTC | 1904 |
| Asp126His | AAAGGGAGAAAGAAGATGATAAAGTCTTCCCTGGTGGAAGCC | |
| tGAT-CAT | ATACATATGTCTGGCAGGTCCTGMAGAGAATGGTC | |
| | GACCATTCTCTTTCAGGACCTGCCAGACATATGTATGGCTTCC | 1905 |
| | ACCAGGGAAGACTTTATCATCTTCTTTCTCCCTTTGACTGGTC | |
| | TGATCATCATATTCAGCTCCTATAGCAGGAAGAAA | |
| | AAGAAGATGATAAAGTC | 1906 |
| | GACTTTATCATCTTCTT | 1907 |
| Haemophilia A | AGTCAAAGGGAGAAAGAAGATGATAAAGTCTTCCCTGGTGGA | 1908 |
| Gln139Term | AGCCATACATATGTCTGGCAGGTCCTGAAAGAGAATGGTCCA | |
| gCAG-TAG | ATGGCCTCTGACCCACTGTGCCTTACCTACTCATATC | |
| | GATATGAGTAGGTAAGGCACAGTGGGTCAGAGGCCATTGGA | 1909 |
| | CCATTCTCTTTCAGGACCTGCCAGACATATGTATGGCTTCCAC | |
| | CAGGGAAGACTTTATCATCTTCTTTCTCCCTTTGACT | |
| | ATGTCTGGCAGGTCCTG | 1910 |
| | CAGGACCTGCCAGACAT | 1911 |
| Haemophilia A | AAAGGGAGAAAGAAGATGATAAAGTCTTCCCTGGTGGAAGCC | 1912 |
| Val140Ala | ATACATATGTCTGGCAGGTCCTGAAAGAGAATGGTCCAATGG | |
| GTC-GCC | CCTCTGACCCACTGTGCCTTACCTACTCATATCTTTC | |
| | GAAAGATATGAGTAGGTAAGGCACAGTGGGTCAGAGGCCATT | 1913 |
| | GGACCATTCTCTTTCAGGACCTGCCAGACATATGTATGGCTT | |
| | CCACCAGGGAAGACTTTATCATCTTCTTTCTCCCTTT | |
| | CTGGCAGGTCCTGAAAG | 1914 |
| | CTTTCAGGACCTGCCAG | 1915 |
| Haemophilia A | AGATGATAAAGTCTTCCCTGGTGGAAGCCATACATATGTCTG | 1916 |
| Asn144Lys | GCAGGTCCTGAAAGAGAATGGTCCAATGGCCTCTGACCCACT | |
| AATg-AAA | GTGCCTTACCTACTCATATCTTTCTCATGTGGACCTG | |
| | CAGGTCCACATGAGAAAGATATGAGTAGGTAAGGCACAGTGG | 1917 |
| | GTCAGAGGCCATTGGACCATTCTCTTTCAGGACCTGCCAGAC | |
| | ATATGTATGGCTTCCACCAGGGAAGACTTTATCATCT | |
| | AAAGAGAATGGTCCAAT | 1918 |
| | ATTGGACCATTCTCTTT | 1919 |
| Haemophilia AG | TATGATAAAGTCTTCCCTGGTGGAAGCCATACATATGTCTGGC | 1920 |
| Gly145Asp | AGGTCCTGAAAGAGAATGGTCCAATGGCCTCTGACCCACTGT | |
| GGT-GAT | TGCCTTACCTACTCATATCTTTCTCATGTGGACCTGGT | |
| | ACCAGGTCCACATGAGAAAGATATGAGTAGGTAAGGCACAGT | 1921 |
| | GGGTCAGAGGCCATTGGACCATTCTCTTTCAGGACCTGCCAG | |
| | ACATATGTATGGCTTCCACCAGGGAAGACTTTATCAT | |
| | AGAGAATGGTCCAATGG | 1922 |
| | CCATTGGACCATTCTCT | 1923 |
| Haemophilia A | ATGATAAAGTCTTCCCTGGTGGAAGCCATACATATGTCTGGC | 1924 |
| Gly145Val | AGGTCCTGAAAGAGAATGGTCCAATGGCCTCTGACCCACTGT | |
| GGT-GTT | GCCTTACCTACTCATATCTTTCTCATGTGGACCTGGT | |
| | ACCAGGTCCACATGAGAAAGATATGAGTAGGTAAGGCACAGT | 1925 |
| | GGGTCAGAGGCCATTGGACCATTCTCTTTCAGGACCTGCCAG | |
| | ACATATGTATGGCTTCCACCAGGGAAGACTTTATCAT | |
| | AGAGAATGGTCCAATGG | 1926 |
| | CCATTGGACCATTCTCT | 1927 |
| Haemophilia A | GATAAAGTCTTCCCTGGTGGAAGCCATACATATGTCTGGCAG | 1928 |
| Pro146Ser | GTCCTGAAAGAGAATGGTCCAATGGCCTCTGACCCACTGTGC | |
| tCCA-TCA | CTTACCTACTCATATCTTTCTCATGTGGACCTGGTAA | |
| | TTACCAGGTCCACATGAGAAAGATATGAGTAGGTAAGGCACA | 1929 |
| | GTGGGTCAGAGGCCATTGGACCATTCTCTTTCAGGACCTGCC | |
| | AGACATATGTATGGCTTCCACCAGGGAAGACTTTATC | |
| | AGAATGGTCCAATGGCC | 1930 |
| | GGCCATTGGACCATTCT | 1931 |
| Haemophilia A | CCATACATATGTCTGGCAGGTCCTGAAAGAGAATGGTCCAAT | 1932 |
| Cys153Trp | GGCCTCTGACCCACTGTGCCTTACCTACTCATATCTTTCTCAT | |
| TGCc-TGG | GTGGACCTGGTAAAAGACTTGAATTCAGGCCTCATT | |
| | AATGAGGCCTGAATTCAAGTCTTTTACCAGGTCCACATGAGAA | 1933 |
| | AGATATGAGTAGGTAAGGCACAGTGGGTCAGAGGCCATTGG | |
| | ACCATTCTCTTTCAGGACCTGCCAGACATATGTATGG | |
| | CCACTGTGCCTTACCTA | 1934 |
| | TAGGTAAGGCACAGTGG | 1935 |
| Haemophilia A | TGTCTGGCAGGTCCTGAAAGAGAATGGTCCAATGGCCTCTGA | 1936 |
| Tyr156Term | CCCACTGTGCCTTACCTACTCATATCTTTCTCATGTGGACCTG | |
| TACt-TAA | GTAAAAGACTTGAATTCAGGCCTCATTGGAGCCCTA | |
| | TAGGGCTCCAATGAGGCCTGAATTCAAGTCTTTTACCAGGTC | 1937 |
| | CACATGAGAAAGATATGAGTAGGTAAGGCACAGTGGGTCAGA | |
| | GGCCATTGGACCATTCTCTTTCAGGACCTGCCAGACA | |
| | CTTACCTACTCATATCT | 1938 |
| | AGATATGAGTAGGTAAG | 1939 |
| Haemophilia A | GTCTGGCAGGTCCTGAAAGAGAATGGTCCAATGGCCTCTGAC | 1940 |
| Ser157Pro | CCACTGTGCCTTACCTACTCATATCTTTCTCATGTGGACCTGG | |
| cTCA-CCA | TAAAAGACTTGAATTCAGGCCTCATTGGAGCCCTAC | |
| | GTAGGGCTCCAATGAGGCCTGAATTCAAGTCTTTTACCAGGT | 1941 |
| | CCACATGAGAAAGATATGAGTAGGTAAGGCACAGTGGGTCAG | |
| | AGGCCATTGGACCATTCTCTTTCAGGACCTGCCAGAC | |
| | TTACCTACTCATATCTT | 1942 |
| | AAGATATGAGTAGGTAA | 1943 |
| Haemophilia A | GTCCTGAAAGAGAATGGTCCAATGGCCTCTGACCCACTGTGC | 1944 |
| Ser160Pro | CTTACCTACTCATATCTTTCTCATGTGGACCTGGTAAAAGACT | |
| tTCT-CCT | TGAATTCAGGCCTCATTGGAGCCCTACTAGTATGTA | |
| | TACATACTAGTAGGGCTCCAATGAGGCCTGAATTCAAGTCTTT | 1945 |
| | TACCAGGTCCACATGAGAAAGATATGAGTAGGTAAGGCACAG | |
| | TGGGTCAGAGGCCATTGGACCATTCTCTTTCAGGAC | |
| | CATATCTTTCTCATGTG | 1946 |
| | CACATGAGAAAGATATG | 1947 |
| Haemophilia A | AAAGAGAATGGTCCAATGGCCTCTGACCCACTGTGCCTTACC | 1948 |
| Val162Met | TACTCATATCTTTCTCATGTGGACCTGGTAAAAGACTTGAATT | |
| tGTG-ATG | CAGGCCTCATTGGAGCCCTACTAGTATGTAGAGAAG | |
| | CTTCTCTACATACTAGTAGGGCTCCAATGAGGCCTGAATTCAA | 1949 |
| | GTCTTTTACCAGGTCCACATGAGAAAGATATGAGTAGGTAAG | |
| | GCACAGTGGGTCAGAGGCCATTGGACCATTCTCTTT | |
| | TTTCTCATGTGGACCTG | 1950 |
| | CAGGTCCACATGAGAAA | 1951 |
| Haemophilia A | CAATGGCCTCTGACCCACTGTGCCTTACCTACTCATATCTTTC | 1952 |
| Lys166Thr | TCATGTGGACCTGGTAAAAGACTTGAATTCAGGCCTCATTGG | |
| AAA-ACA | AGCCCTACTAGTATGTAGAGAAGGTAAGTGTATGAA | |
| | TTCATACACTTACCTTCTCTACATACTAGTAGGGCTCCAATGA | 1953 |
| | GGCCTGAATTCAAGTCTTTTACCAGGTCCACATGAGAAAGATA | |
| | TGAGTAGGTAAGGCACAGTGGGTCAGAGGCCATTG | |
| | CCTGGTAAAAGACTTGA | 1954 |
| | TCAAGTCTTTTACCAGG | 1955 |
| Haemophilia A | ACCCACTGTGCCTTACCTACTCATATCTTTCTCATGTGGACCT | 1956 |
| Ser170Leu | GGTAAAAGACTTGAATTCAGGCCTCATTGGAGCCCTACTAGT | |
| TCA-TTA | ATGTAGAGAAGGTAAGTGTATGAAAGCGTAGGATTG | |
| | CAATCCTACGCTTTCATACACTTACCTTCTCTACATACTAGTAG | 1957 |
| | GGCTCCAATGAGGCCTGAATTCAAGTCTTTTACCAGGTCCAC | |
| | ATGAGAAAGATATGAGTAGGTAAGGCACAGTGGGT | |
| | CTTGAATTCAGGCCTCA | 1958 |
| | TGAGGCCTGAATTCAAG | 1959 |
| Haemophilia A | AATGTTCTCACTTCTTTTTCAGGGAGTCTGGCCAAGGAAAAGA | 1960 |
| Phe195Val | CACAGACCTTGCACAAATTTATACTACTTTTTGCTGTATTTGAT | |
| aTTT-GTT | GAAGGTTAGTGAGTCTTAATCTGAATTTTGGATT | |
| | AATCCAAAATTCAGATTAAGACTCACTAACCTTCATCAAATACA | 1961 |
| | GCAAAAAGTAGTATAAATTTGTGCAAGGTCTGTGTCTTTTCCT | |
| | TGGCCAGACTCCCTGAAAAAGAAGTGAGAACATT | |
| | TGCACAAATTTATACTA | 1962 |
| | TAGTATAAATTTGTGCA | 1963 |
| Haemophilia A | CTTCTTTTTCAGGGAGTCTGGCCAAGGAAAAGACACAGACCT | 1964 |
| Leu198His | TGCACAAATTTATACTACTTTTTGCTGTATTTGATGAAGGTTAG | |
| CTT-CAT | TGAGTCTTAATCTGAATTTTGGATTCCTGAAAGAA | |
| | TTCTTTCAGGAATCCAAAATTCAGATTAAGACTCACTAACCTTC | 1965 |
| | ATCAAATACAGCAAAAAGTAGTATAAATTTGTGCAAGGTCTGT | |
| | GTCTTTTCCTTGGCCAGACTCCCTGAAAAAGAAG | |
| | TATACTACTTTTTGCTG | 1966 |
| | CAGCAAAAAGTAGTATA | 1967 |
| Haemophilia A | TTTCAGGGAGTCTGGCCAAGGAAAAGACACAGACCTTGCACA | 1968 |
| Ala200Asp | AATTTATACTACTTTTTGCTGTATTTGATGAAGGTTAGTGAGTC | |
| GCT-GAT | TTAATCTGAATTTTGGATTCCTGAAAGAAATCCTC | |
| | GAGGATTTCTTTCAGGAATCCAAAATTCAGATTAAGACTCACT | 1969 |
| | AACCTTCATCAAATACAGCAAAAAGTAGTATAAATTTGTGCAA | |
| | GGTCTGTGTCTTTTCCTTGGCCAGACTCCCTGAAA | |
| | ACTTTTTGCTGTATTTG | 1970 |
| | CAAATACAGCAAAAAGT | 1971 |
| Haemophilia A | TTTTCAGGGAGTCTGGCCAAGGAAAAGACACAGACCTTGCAC | 1972 |
| Ala200Thr | AAATTTATACTACTTTTTGCTGTATTTGATGAAGGTTAGTGAGT | |
| tGCT-ACT | CTTAATCTGAATTTTGGATTCCTGAAAGAAATCCT | |
| | AGGATTTCTTTCAGGAATCCAAAATTCAGATTAAGACTCACTA | 1973 |
| | ACCTTCATCAAATACAGCAAAAAGTAGTATAAATTTGTGCAAG | |
| | GTCTGTGTCTTTTCCTTGGCCAGACTCCCTGAAAA | |
| | TACTTTTTGCTGTATTT | 1974 |
| | AAATACAGCAAAAAGTA | 1975 |
| Haemophilia A | AACTCCTTGATGCAGGATAGGGATGCTGCATCTGCTCGGGCC | 1976 |
| Val234Phe | TGGCCTAAAATGCACACAGTCAATGGTTATGTAAACAGGTCTC | |
| aGTC-TTC | TGCCAGGTATGTACACACCTGCTCAACAATCCTCAG | |
| | CTGAGGATTGTTGAGCAGGTGTGTACATACCTGGCAGAGACC | 1977 |
| | TGTTTACATAACCATTGACTGTGTGCATTTTAGGCCAGGCCCG | |
| | AGCAGATGCAGCATCCCTATCCTGCATCAAGGAGTT | |
| | TGCACACAGTCAATGGT | 1978 |
| | ACCATTGACTGTGTGCA | 1979 |
| Haemophilia A | ATTTCAGATTCTCTACTTCATAGCCATAGGTGTCTTATTCCTAC | 1980 |
| Gly247Glu | TTTACAGGTCTGATTGGATGCCACAGGAAATCAGTCTATTGG | |
| GGA-GAA | CATGTGATTGGAATGGGCACCACTCCTGAAGTGCA | |
| | TGCACTTCAGGAGTGGTGCCCATTCCAATCACATGCCAATAG | 1981 |
| | ACTGATTTCCTGTGGCATCCAATCAGACCTGTAAAGTAGGAAT | |
| | AAGACACCTATGGCTATGAAGTAGAGAATCTGAAAT | |
| | TCTGATTGGATGCCACA | 1982 |
| | TGTGGCATCCAATCAGA | 1983 |
| Haemophilia A | ATAGGTGTCTTATTCCTACTTTACAGGTCTGATTGGATGCCAC | 1984 |
| Trp255Cys | AGGAAATCAGTCTATTGGCATGTGATTGGAATGGGCACCACT | |
| TGGc-TGT | CCTGAAGTGCACTCAATATTCCTCGAAGGTCACACA | |
| | TGTGTGACCTTCGAGGAATATTGAGTGCACTTCAGGAGTGGT | 1985 |
| | GCCCATTCCAATCACATGCCAATAGACTGATTTCCTGTGGCAT | |
| | CCAATCAGACCTGTAAAGTAGGAATAAGACACCTAT | |
| | GTCTATTGGCATGTGAT | 1986 |
| | ATCACATGCCAATAGAC | 1987 |
| Haemophilia A | ATAGGTGTCTTATTCCTACTTTACAGGTCTGATTGGATGCCAC | 1988 |
| Trp255Term | AGGAAATCAGTCTATTGGCATGTGATTGGAATGGGCACCACT | |
| TGGc-TGA | CCTGAAGTGCACTCAATATTCCTCGAAGGTCACACA | |
| | TGTGTGACCTTCGAGGAATATTGAGTGCACTTCAGGAGTGGT | 1989 |
| | GCCCATTCCAATCACATGCCAATAGACTGATTTCCTGTGGCAT | |
| | CCAATCAGACCTGTAAAGTAGGAATAAGACACCTAT | |
| | GTCTATTGGCATGTGAT | 1990 |
| | ATCACATGCCAATAGAC | 1991 |
| Haemophilia A | AGGTGTCTTATTCCTACTTTACAGGTCTGATTGGATGCCACAG | 1992 |
| His256Leu | GAAATCAGTCTATTGGCATGTGATTGGAATGGGCACCACTCC | |
| CAT-CTT | TGAAGTGCACTCAATATTCCTCGAAGGTCACACATT | |
| | AATGTGTGACCTTCGAGGAATATTGAGTGCACTTCAGGAGTG | 1993 |
| | GTGCCCATTCCAATCACATGCCAATAGACTGATTTCCTGTGGC | |
| | ATCCAATCAGACCTGTAAAGTAGGAATAAGACACCT | |
| | CTATTGGCATGTGATTG | 1994 |
| | CAATCACATGCCAATAG | 1995 |
| Haemophilia A | TATTCCTACTTTACAGGTCTGATTGGATGCCACAGGAAATCAG | 1996 |
| Gly259Arg | TCTATTGGCATGTGATTGGAATGGGCACCACTCCTGAAGTGC | |
| tGGA-AGA | ACTCAATATTCCTCGAAGGTCACACATTTCTTGTGA | |
| | TCACAAGAAATGTGTGACCTTCGAGGAATATTGAGTGCACTTC | 1997 |
| | AGGAGTGGTGCCCATTCCAATCACATGCCAATAGACTGATTT | |
| | CCTGTGGCATCCAATCAGACCTGTAAAGTAGGAATA | |
| | ATGTGATTGGAATGGGC | 1998 |
| | GCCCATTCCAATCACAT | 1999 |
| Haemophilia A | TTGGATGCCACAGGAAATCAGTCTATTGGCATGTGATTGGAA | 2000 |
| Val266Gly | TGGGCACCACTCCTGAAGTGCACTCAATATTCCTCGAAGGTC | |
| GTG-GGG | ACACATTTCTTGTGAGGAACCATCGCCAGGCGTCCTT | |
| | AAGGACGCCTGGCGATGGTTCCTCACAAGAAATGTGTGACCT | 2001 |
| | TCGAGGAATATTGAGTGCACTTCAGGAGTGGTGCCCATTCCA | |
| | ATCACATGCCAATAGACTGATTTCCTGTGGCATCCAA | |
| | TCCTGAAGTGCACTCAA | 2002 |
| | TTGAGTGCACTTCAGGA | 2003 |
| Haemophilia A | CAGTCTATTGGCATGTGATTGGAATGGGCACCACTCCTGAAG | 2004 |
| Glu272Gly | TGCACTCAATATTCCTCGAAGGTCACACATTTCTTGTGAGGAA | |
| GAA-GGA | CCATCGCCAGGCGTCCTTGGAAATCTCGCCAATAAC | |
| | GTTATTGGCGAGATTTCCAAGGACGCCTGGCGATGGTTCCTC | 2005 |
| | ACAAGAAATGTGTGACCTTCGAGGAATATTGAGTGCACTTCA | |
| | GGAGTGGTGCCCATTCCAATCACATGCCAATAGACTG | |
| | ATTCCTCGAAGGTCACA | 2006 |
| | TGTGACCTTCGAGGAAT | 2007 |
| Haemophilia A | TCAGTCTATTGGCATGTGATTGGAATGGGCACCACTCCTGAA | 2008 |
| Glu272Lys | GTGCACTCAATATTCCTCGAAGGTCACACATTTCTTGTGAGGA | |
| cGAA-AAA | ACCATCGCCAGGCGTCCTTGGAAATCTCGCCAATAA | |
| | TTATTGGCGAGATTTCCAAGGACGCCTGGCGATGGTTCCTCA | 2009 |
| | CAAGAAATGTGTGACCTTCGAGGAATATTGAGTGCACTTCAG | |
| | GAGTGGTGCCCATTCCAATCACATGCCAATAGACTGA | |
| | TATTCCTCGAAGGTCAC | 2010 |
| | GTGACCTTCGAGGAATA | 2011 |
| Haemophilia A | GGCATGTGATTGGAATGGGCACCACTCCTGAAGTGCACTCAA | 2012 |
| Thr275Ile | TATTCCTCGAAGGTCACACATTTCTTGTGAGGAACCATCGCCA | |
| ACA-ATA | GGCGTCCTTGGAAATCTCGCCAATAACTTTCCTTAC | |
| | GTAAGGAAAGTTATTGGCGAGATTTCCAAGGACGCCTGGCGA | 2013 |
| | TGGTTCCTCACAAGAAATGTGTGACCTTCGAGGAATATTGAGT | |
| | GCACTTCAGGAGTGGTGCCCATTCCAATCACATGCC | |
| | AGGTCACACATTTCTTG | 2014 |
| | CAAGAAATGTGTGACCT | 2015 |
| Haemophilia A | TTGGAATGGGCACCACTCCTGAAGTGCACTCAATATTCCTCG | 2016 |
| Val278Ala | AAGGTCACACATTTCTTGTGAGGAACCATCGCCAGGCGTCCT | |
| GTG-GCG | TGGAAATCTCGCCAATAACTTTCCTTACTGCTCAAAC | |
| | GTTTGAGCAGTAAGGAAAGTTATTGGCGAGATTTCCAAGGAC | 2017 |
| | GCCTGGCGATGGTTCCTCACAAGAAATGTGTGACCTTCGAGG | |
| | AATATTGAGTGCACTTCAGGAGTGGTGCCCATTCCAA | |
| | ATTTCTTGTGAGGAACC | 2018 |
| | GGTTCCTCACAAGAAAT | 2019 |
| Haemophilia A | TGGGCACCACTCCTGAAGTGCACTCAATATTCCTCGAAGGTC | 2020 |
| Asn280Ile | ACACATTTCTTGTGAGGAACCATCGCCAGGCGTCCTTGGAAA | |
| AAC-ATC | TCTCGCCAATAACTTTCCTTACTGCTCAAACACTCTT | |
| | AAGAGTGTTTGAGCAGTAAGGAAAGTTATTGGCGAGATTTCC | 2021 |
| | AAGGACGCCTGGCGATGGTTCCTCACAAGAAATGTGTGACCT | |
| | TCGAGGAATATTGAGTGCACTTCAGGAGTGGTGCCCA | |
| | TGTGAGGAACCATCGCC | 2022 |
| | GGCGATGGTTCCTCACA | 2023 |
| Haemophilia A | ACCACTCCTGAAGTGCACTCAATATTCCTCGAAGGTCACACAT | 2024 |
| Arg282Cys | TTCTTGTGAGGAACCATCGCCAGGCGTCCTTGGAAATCTCGC | |
| tCGC-TGC | CAATAACTTTCCTTACTGCTCAAACACTCTTGATGG | |
| | CCATCAAGAGTGTTTGAGCAGTAAGGAAAGTTATTGGCGAGA | 2025 |
| | TTTCCAAGGACGCCTGGCGATGGTTCCTCACAAGAAATGTGT | |
| | GACCTTCGAGGAATATTGAGTGCACTTCAGGAGTGGT | |
| | GGAACCATCGCCAGGCG | 2026 |
| | CGCCTGGCGATGGTTCC | 2027 |
| Haemophilia A | CCACTCCTGAAGTGCACTCAATATTCCTCGAAGGTCACACATT | 2028 |
| Arg282His | TCTTGTGAGGAACCATCGCCAGGCGTCCTTGGAAATCTCGCC | |
| CGC-CAC | AATAACTTTCCTTACTGCTCAAACACTCTTGATGGA | |
| | TCCATCAAGAGTGTTTGAGCAGTAAGGAAAGTTATTGGCGAG | 2029 |
| | ATTTCCAAGGACGCCTGGCGATGGTTCCTCACAAGAAATGTG | |
| | TGACCTTCGAGGAATATTGAGTGCACTTCAGGAGTGG | |
| | GAACCATCGCCAGGCGT | 2030 |
| | ACGCCTGGCGATGGTTC | 2031 |
| Haemophilia A | CCACTCCTGAAGTGCACTCAATATTCCTCGAAGGTCACACATT | 2032 |
| Arg282Leu | TCTTGTGAGGAACCATCGCCAGGCGTCCTTGGAAATCTCGCC | |
| CGC-CTC | AATAACTTTCCTTACTGCTCAAACACTCTTGATGGA | |
| | TCCATCAAGAGTGTTTGAGCAGTAAGGAAAGTTATTGGCGAG | 2033 |
| | ATTTCCAAGGACGCCTGGCGATGGTTCCTCACAAGAAATGTG | |
| | TGACCTTCGAGGAATATTGAGTGCACTTCAGGAGTGG | |
| | GAACCATCGCCAGGCGT | 2034 |
| | ACGCCTGGCGATGGTTC | 2035 |
| Haemophilia A | CTGAAGTGCACTCAATATTCCTCGAAGGTCACACATTTCTTGT | 2036 |
| Ala284Glu | GAGGAACCATCGCCAGGCGTCCTTGGAAATCTCGCCAATAAC | |
| GCG-GAG | TTTCCTTACTGCTCAAACACTCTTGATGGACCTTGG | |
| | CCAAGGTCCATCAAGAGTGTTTGAGCAGTAAGGAAAGTTATT | 2037 |
| | GGCGAGATTTCCAAGGACGCCTGGCGATGGTTCCTCACAAG | |
| | AAATGTGTGACCTTCGAGGAATATTGAGTGCACTTCAG | |
| | TCGCCAGGCGTCCTTGG | 2038 |
| | CCAAGGACGCCTGGCGA | 2039 |
| Haemophilia A | CCTGAAGTGCACTCAATATTCCTCGAAGGTCACACATTTCTTG | 2040 |
| Ala284Pro | TGAGGAACCATCGCCAGGCGTCCTTGGAAATCTCGCCAATAA | |
| gGCG-CCG | CTTTCCTTACTGCTCAAACACTCTTGATGGACCTTG | |
| | CAAGGTCCATCAAGAGTGTTTGAGCAGTAAGGAAAGTTATTG | 2041 |
| | GCGAGATTTCCAAGGACGCCTGGCGATGGTTCCTCACAAGAA | |
| | ATGTGTGACCTTCGAGGAATATTGAGTGCACTTCAGG | |
| | ATCGCCAGGCGTCCTTG | 2042 |
| | CAAGGACGCCTGGCGAT | 2043 |
| Haemophilia A | TATTCCTCGAAGGTCACACATTTCTTGTGAGGAACCATCGCCA | 2044 |
| Ser289Leu | GGCGTCCTTGGAAATCTCGCCAATAACTTTCCTTACTGCTCAA | |
| TCG-TTG | ACACTCTTGATGGACCTTGGACAGTTTCTACTGTT | |
| | AACAGTAGAAACTGTCCAAGGTCCATCAAGAGTGTTTGAGCA | 2045 |
| | GTAAGGAAAGTTATTGGCGAGATTTCCAAGGACGCCTGGCGA | |
| | TGGTTCCTCACAAGAAATGTGTGACCTTCGAGGAATA | |
| | GGAAATCTCGCCAATAA | 2046 |
| | TTATTGGCGAGATTTCC | 2047 |
| Haemophilia A | GTCACACATTTCTTGTGAGGAACCATCGCCAGGCGTCCTTGG | 2048 |
| Phe293Ser | AAATCTCGCCAATAACTTTCCTTACTGCTCAAACACTCTTGATT | |
| TTC-TCC | GGACCTTGGACAGTTTCTACTGTTTTGTCATATCTC | |
| | GAGATATGACAAAACAGTAGAAACTGTCCAAGGTCCATCAAG | 2049 |
| | AGTGTTTGAGCAGTAAGGAAAGTTATTGGCGAGATTTCCAAG | |
| | GACGCCTGGCGATGGTTCCTCACAAGAAATGTGTGAC | |
| | AATAACTTTCCTTACTG | 2050 |
| | CAGTAAGGAAAGTTATT | 2051 |
| Haemophilia A | ACATTTCTTGTGAGGAACCATCGCCAGGCGTCCTTGGAAATC | 2052 |
| Thr295Ala | TCGCCAATAACTTTCCTTACTGCTCAAACACTCTTGATGGACC | |
| tACT-GCT | TTGGACAGTTTCTACTGTTTTGTCATATCTCTTCCC | |
| | GGGAAGAGATATGACAAAACAGTAGAAACTGTCCAAGGTCCA | 2053 |
| | TCAAGAGTGTTTGAGCAGTAAGGAAAGTTATTGGCGAGATTT | |
| | CCAAGGACGCCTGGCGATGGTTCCTCACAAGAAATGT | |
| | CTTTCCTTACTGCTCAA | 2054 |
| | TTGAGCAGTAAGGAAAG | 2055 |
| Haemophilia A | CATTTCTTGTGAGGAACCATCGCCAGGCGTCCTTGGAAATCT | 2056 |
| Thr295Ile | CGCCAATAACTTTCCTTACTGCTCAAACACTCTTGATGGACCT | |
| ACT-ATT | TGGACAGTTTCTACTGTTTTGTCATATCTCTTCCCA | |
| | TGGGAAGAGATATGACAAAACAGTAGAAACTGTCCAAGGTCC | 2057 |
| | ATCAAGAGTGTTTGAGCAGTAAGGAAAGTTATTGGCGAGATTT | |
| | CCAAGGACGCCTGGCGATGGTTCCTCACAAGAAATG | |
| | TTTCCTTACTGCTCAAA | 2058 |
| | TTTGAGCAGTAAGGAAA | 2059 |
| Haemophilia A | TTCTTGTGAGGAACCATCGCCAGGCGTCCTTGGAAATCTCGC | 2060 |
| Ala296Val | CAATAACTTTCCTTACTGCTCAAACACTCTTGATGGACCTTGG | |
| GCT-GTT | ACAGTTTCTACTGTTTTGTCATATCTCTTCCCACCA | |
| | TGGTGGGAAGAGATATGACAAAACAGTAGAAACTGTCCAAGG | 2061 |
| | TCCATCAAGAGTGTTTGAGCAGTAAGGAAAGTTATTGGCGAG | |
| | ATTTCCAAGGACGCCTGGCGATGGTTCCTCACAAGAA | |
| | CCTTACTGCTCAAACAC | 2062 |
| | GTGTTTGAGCAGTAAGG | 2063 |
| Haemophilia A | TCTCGCCAATAACTTTCCTTACTGCTCAAACACTCTTGATGGA | 2064 |
| Leu308Pro | CCTTGGACAGTTTCTACTGTTTTGTCATATCTCTTCCCACCAA | |
| CTG-CCG | CATGGTAATATCTTGGATCTTTAAAATGAATATTA | |
| | TAATATTCATTTTAAAGATCCAAGATATTACCATGTTGGTGGG | 2065 |
| | AAGAGATATGACAAAACAGTAGAAACTGTCCAAGGTCCATCA | |
| | AGAGTGTTTGAGCAGTAAGGAAAGTTATTGGCGAGA | |
| | GTTTCTACTGTTTTGTC | 2066 |
| | GACAAAACAGTAGAAAC | 2067 |
| Haemophilia A | ACAGCCTAATATAGCAAGACACTCTGACATTGTTTGGTTTGTC | 2068 |
| Glu321Lys | TGACTCCAGATGGCATGGAAGCTTATGTCAAAGTAGACAGCT | |
| gGAA-AAA | GTCCAGAGGAACCCCAACTACGAATGAAAAATAATG | |
| | CATTATTTTTCATTCGTAGTTGGGGTTCCTCTGGACAGCTGTC | 2069 |
| | TACTTTGACATAAGCTTCCATGCCATCTGGAGTCAGACAAACC | |
| | AAACAATGTCAGAGTGTCTTGCTATATTAGGCTGT | |
| | ATGGCATGGAAGCTTAT | 2070 |
| | ATAAGCTTCCATGCCAT | 2071 |
| Haemophilia A | ATATAGCAAGACACTCTGACATTGTTTGGTTTGTCTGACTCCA | 2072 |
| Tyr323Term | GATGGCATGGAAGCTTATGTCAAAGTAGACAGCTGTCCAGAG | |
| TATg-TAA | GAACCCCAACTACGAATGAAAAATAATGAAGAAGCG | |
| | CGCTTCTTCATTATTTTTCATTCGTAGTTGGGGTTCCTCTGGA | 2073 |
| | CAGCTGTCTACTTTGACATAAGCTTCCATGCCATCTGGAGTCA | |
| | GACAAACCAAACAATGTCAGAGTGTCTTGCTATAT | |
| | GAAGCTTATGTCAAAGT | 2074 |
| | ACTTTGACATAAGCTTC | 2075 |
| Haemophilia A | AAGACACTCTGACATTGTTTGGTTTGTCTGACTCCAGATGGCA | 2076 |
| Val326Leu | TGGAAGCTTATGTCAAAGTAGACAGCTGTCCAGAGGAACCCC | |
| aGTA-CTA | AACTACGAATGAAAAATAATGAAGAAGCGGAAGACT | |
| | AGTCTTCCGCTTCTTCATTATTTTTCATTCGTAGTTGGGGTTCC | 2077 |
| | TCTGGACAGCTGTCTACTTTGACATAAGCTTCCATGCCATCTG | |
| | GAGTCAGACAAACCAAACAATGTCAGAGTGTCTT | |
| | ATGTCAAAGTAGACAGC | 2078 |
| | GCTGTCTACTTTGACAT | 2079 |
| Haemophilia A | TGACATTGTTTGGTTTGTCTGACTCCAGATGGCATGGAAGCTT | 2080 |
| Cys329Arg | ATGTCAAAGTAGACAGCTGTCCAGAGGAACCCCAACTACGAA | |
| cTGT-CGT | TGAAAAATAATGAAGAAGCGGAAGACTATGATGATG | |
| | CATCATCATAGTCTTCCGCTTCTTCATTATTTTTCATTCGTAGT | 2081 |
| | TGGGGTTCCTCTGGACAGCTGTCTACTTTGACATAAGCTTCC | |
| | ATGCCATCTGGAGTCAGACAAACCAAACAATGTCA | |
| | TAGACAGCIGTCCAGAG | 2082 |
| | CTCTGGACAGCTGTCTA | 2083 |
| Haemophilia A | GACATTGTTTGGTTTGTCTGACTCCAGATGGCATGGAAGCTTA | 2084 |
| Cys329Tyr | TGTCAAAGTAGACAGCTGTCCAGAGGAACCCCAACTACGAAT | |
| TGT-TAT | GAAAAATAATGAAGAAGCGGAAGACTATGATGATGA | |
| | TCATCATCATAGTCTTCCGCTTCTTCATTATTTTTCATTCGTAG | 2085 |
| | TTGGGGTTCCTCTGGACAGCTGTCTACTTTGACATAAGCTTCC | |
| | ATGCCATCTGGAGTCAGACAAACCAAACAATGTC | |
| | AGACAGCTGTCCAGAGG | 2086 |
| | CCTCTGGACAGCTGTCT | 2087 |
| Haemophilia A | ACTCCAGATGGCATGGAAGCTTATGTCAAAGTAGACAGCTGT | 2088 |
| Arg336Term | CCAGAGGAACCCCAACTACGAATGAAAAATAATGAAGAAGCG | |
| aCGA-TGA | GAAGACTATGATGATGATCTTACTGATTCTGAAATGG | |
| | CCATTTCAGAATCAGTAAGATCATCATCATAGTCTTCCGCTTC | 2089 |
| | TTCATTATTTTTCATTCGTAGTTGGGGTTCCTCTGGACAGCTG | |
| | TCTACTTTGACATAAGCTTCCATGCCATCTGGAGT | |
| | CCCAACTACGAATGAAA | 2090 |
| | TTTCATTCGTAGTTGGG | 2091 |
| Haemophilia A | GATTCTGAAATGGATGTGGTCAGGTTTGATGATGACAACTCTC | 2092 |
| Arg372Cys | CTTCCTTTATCCAAATTCGCTCAGTTGCCAAGAAGCATCCTAA | |
| tCGC-TGC | AACTTGGGTACATTACATTGCTGCTGAAGAGGAGG | |
| | CCTCCTCTTCAGCAGCAATGTAATGTACCCAAGTTTTAGGATG | 2093 |
| | CTTCTTGGCAACTGAGCGAATTTGGATAAAGGAAGGAGAGTT | |
| | GTCATCATCAAACCTGACCACATCCATTTCAGAATC | |
| | TCCAAATTCGCTCAGTT | 2094 |
| | AACTGAGCGAATTTGGA | 2095 |
| Haemophilia A | ATTCTGAAATGGATGTGGTCAGGTTTGATGATGACAACTCTCC | 2096 |
| Arg372His | TTCCTTTATCCAAATTCGCTCAGTTGCCAAGAAGCATCCTAAA | |
| CGC-CAC | ACTTGGGTACATTACATTGCTGCTGAAGAGGAGGA | |
| | TCCTCCTCTTCAGCAGCAATGTAATGTACCCAAGTTTTAGGAT | 2097 |
| | GCTTCTTGGCAACTGAGCGAATTTGGATAAAGGAAGGAGAGT | |
| | TGTCATCATCAAACCTGACCACATCCATTTCAGAAT | |
| | CCAAATTCGCTCAGTTG | 2098 |
| | CAACTGAGCGAATTTGG | 2099 |
| Haemophilia A | CTGAAATGGATGTGGTCAGGTTTGATGATGACAACTCTCCTTC | 2100 |
| Ser373Leu | CTTTATCCAAATTCGCTCAGTTGCCAAGAAGCATCCTAAAACT | |
| TCA-TTA | TGGGTACATTACATTGCTGCTGAAGAGGAGGACTG | |
| | CAGTCCTCCTCTTCAGCAGCAATGTAATGTACCCAAGTTTTAG | 2101 |
| | GATGCTTCTTGGCAACTGAGCGAATTTGGATAAAGGAAGGAG | |
| | AGTTGTCATCATCAAACCTGACCACATCCATTTCAG | |
| | AATTCGCTCAGTTGCCA | 2102 |
| | TGGCAACTGAGCGAATT | 2103 |
| Haemophilia A | TCTGAAATGGATGTGGTCAGGTTTGATGATGACAACTCTCCTT | 2104 |
| Ser373Pro | CCTTTATCCAAATTCGCTCAGTTGCCAAGAAGCATCCTAAAAC | |
| cTCA-CCA | TTGGGTACATTACATTGCTGCTGAAGAGGAGGACT | |
| | AGTCCTCCTCTTCAGCAGCAATGTAATGTACCCAAGTTTTAGG | 2105 |
| | ATGCTTCTTGGCAACTGAGCGAATTTGGATTAAAGGAAGGAGA | |
| | GTTGTCATCATCAAACCTGACCACATCCATTTCAGA | |
| | AAATTCGCTCAGTTGCC | 2106 |
| | GGCAACTGAGCGAATTT | 2107 |
| Haemophilia A | CTGAAATGGATGTGGTCAGGTTTGATGATGACAACTCTCCTTC | 2108 |
| Ser373Term | CTTTATCCAAATTCGCTCAGTTGCCAAGAAGCATCCTAAAACT | |
| TCA-TAA | TGGGTACATTACATTGCTGCTGAAGAGGAGGACTG | |
| | CAGTCCTCCTCTTCAGCAGCAATGTAATGTACCCAAGTTTTAG | 2109 |
| | GATGCTTCTTGGCAACTGAGCGAATTTGGATAAAGGAAGGAG | |
| | AGTTGTCATCATCAAACCTGACCACATCCATTTCAG | |
| | AATTCGCTCAGTTGCCA | 2110 |
| | TGGCAACTGAGCGAATT | 2111 |
| Haemophilia A | CCTTCCTTTATCCAAATTCGCTCAGTTGCCAAGAAGCATCCTA | 2112 |
| Ile386Phe | AAACTTGGGTACATTACATTGCTGCTGAAGAGGAGGACTGGG | |
| cATT-TTT | ACTATGCTCCCTTAGTCCTCGCCCCCGATGACAGGT | |
| | ACCTGTCATCGGGGGCGAGGACTAAGGGAGCATAGTCCCAG | 2113 |
| | TCCTCCTCTTCAGCAGCAATGTAATGTACCCAAGTTTTAGGAT | |
| | GCTTCTTGGCAACTGAGCGAATTTGGATAAAGGAAGG | |
| | TACATTACATTGCTGCT | 2114 |
| | AGCAGCAATGTAATGTA | 2115 |
| Haemophilia A | CTTCCTTTATCCAAATTCGCTCAGTTGCCAAGAAGCATCCTAA | 2116 |
| Ile386Ser | AACTTGGGTACATTACATTGCTGCTGAAGAGGAGGACTGGGA | |
| ATT-AGT | CTATGCTCCCTTAGTCCTCGCCCCCGATGACAGGTA | |
| | TACCTGTCATCGGGGGCGAGGACTAAGGGAGCATAGTCCCA | 2117 |
| | GTCCTCCTCTTCAGCAGCAATGTAATGTACCCAAGTTTTAGGA | |
| | TGCTTCTTGGCAACTGAGCGAATTTGGATAAAGGAAG | |
| | ACATTACATTGCTGCTG | 2118 |
| | CAGCAGCAATGTAATGT | 2119 |
| Haemophilia A | AAATTCGCTCAGTTGCCAAGAAGCATCCTAAAACTTGGGTACA | 2120 |
| Glu390Gly | TTACATTGCTGCTGAAGAGGAGGACTGGGACTATGCTCCCTT | |
| GAG-GGG | AGTCCTCGCCCCCGATGACAGGTAAGCACTTTTTGA | |
| | TCAAAAAGTGCTTACCTGTCATCGGGGGCGAGGACTAAGGGA | 2121 |
| | GCATAGTCCCAGTCCTCCTCTTCAGCAGCAATGTAATGTACC | |
| | CAAGTTTTAGGATGCTTCTTGGCAACTGAGCGAATTT | |
| | TGCTGAAGAGGAGGACT | 2122 |
| | AGTCCTCCTCTTCAGCA | 2123 |
| Haemophilia A | TCAGTTGCCAAGAAGCATCCTAAAACTTGGGTACATTACATTG | 2124 |
| Trp393Gly | CTGCTGAAGAGGAGGACTGGGACTATGCTCCCTTAGTCCTCG | |
| cTGG-GGG | CCCCCGATGACAGGTAAGCACTTTTTGACTATTGGT | |
| | ACCAATAGTCAAAAAGTGCTTACCTGTCATCGGGGGCGAGGA | 2125 |
| | CTAAGGGAGCATAGTCCCAGTCCTCCTCTTCAGCAGCAATGT | |
| | AATGTACCCAAGTTTTAGGATGCTTCTTGGCAACTGA | |
| | AGGAGGACTGGGACTAT | 2126 |
| | ATAGTCCCAGTCCTCCT | 2127 |
| Haemophilia A | GCCTACCTAGAATTTTTCTTCCCAACCTCTCATCTTTTTTTCTC | 2128 |
| Lys408Ile | TTATACAGAAGTTATAAAAGTCAATATTTGAACAATGGCCCTC | |
| AAA-ATA | AGCGGATTGGTAGGAAGTACAAAAAAGTCCGATT | |
| | AATCGGACTTTTTTGTACTTCCTACCAATCCGCTGAGGGCCAT | 2129 |
| | TGTTCAAATATTGACTTTTATAACTTCTGTATAAGAGAAAAAAA | |
| | GATGAGAGGTTGGGAAGAAAAATTCTAGGTAGGC | |
| | AAGTTATAAAAGTCAAT | 2130 |
| | ATTGACTTTTATAACTT | 2131 |
| Haemophilia A | TTTTCTTCCCAACCTCTCATCTTTTTTTCTCTTATACAGAAGTT | 2132 |
| Leu412Phe | ATAAAAGTCAATATTTGAACAATGGCCCTCAGCGGATTGGTAG | |
| TTGa-TTT | GAAGTACAAAAAAGTCCGATTTATGGCATACACA | |
| | TGTGTATGCCATAAATCGGACTTTTTTGTACTTCCTACCAATC | 2133 |
| | CGCTGAGGGCCATTGTTCAAATATTGACTTTTATAACTTCTGT | |
| | ATAAGAGAAAAAAAGATGAGAGGTTGGGAAGAAAA | |
| | CAATATTTGAACAATGG | 2134 |
| | CCATTGTTCAAATATTG | 2135 |
| Haemophilia A | TCATCTTTTTTTCTCTTATACAGAAGTTATAAAAGTCAATATTTG | 2136 |
| Arg418Trp | AACAATGGCCCTCAGCGGATTGGTAGGAAGTACAAAAAAGTC | |
| gCGG-TGG | CGATTTATGGCATACACAGATGAAACCTTTAAGA | |
| | TCTTAAAGGTTTCATCTGTGTATGCCATAAATCGGACTTTTTTG | 2137 |
| | TACTTCCTACCAATCCGCTGAGGGCCATTGTTCAAATATTGAC | |
| | TTTTATAACTTCTGTATAAGAGAAAAAAAGATGA | |
| | GCCCTCAGCGGATTGGT | 2138 |
| | ACCAATCCGCTGAGGGC | 2139 |
| Haemophilia A | TTTTTCTCTTATACAGAAGTTATAAAAGTCAATATTTGAACAAT | 2140 |
| Gly420Val | GGCCCTCAGCGGATTGGTAGGAAGTACAAAAAAGTCCGATTT | |
| GGT-GTT | ATGGCATACACAGATGAAACCTTTAAGACTCGTGA | |
| | TCACGAGTCTTAAAGGTTTCATCTGTGTATGCCATAAATCGGA | 2141 |
| | CTTTTTTGTACTTCCTACCAATCCGCTGAGGGCCATTGTTCAA | |
| | ATATTGACTTTTATAACTTCTGTATAAGAGAAAAA | |
| | GCGGATTGGTAGGAAGT | 2142 |
| | ACTTCCTACCAATCCGC | 2143 |
| Haemophilia A | GAAGTTATAAAAGTCAATATTTGAACAATGGCCCTCAGCGGAT | 2144 |
| Lys425Arg | TGGTAGGAAGTACAAAAAAGTCCGATTTATGGCATACACAGA | |
| AAA-AGA | TGAAACCTTTAAGACTCGTGAAGCTATTCAGCATGA | |
| | TCATGCTGAATAGCTTCACGAGTCTTAAAGGTTTCATCTGTGT | 2145 |
| | ATGCCATAAATCGGACTTTTTTGTACTTCCTACCAATCCGCTG | |
| | AGGGCCATTGTTCAAATATTGACTTTTATAACTTC | |
| | GTACAAAAAAGTCCGAT | 2146 |
| | ATCGGACTTTTTTGTAC | 2147 |
| Haemophilia A | TATAAAAGTCAATATTTGAACAATGGCCCTCAGCGGATTGGTA | 2148 |
| Arg427Term | GGAAGTACAAAAAAGTCCGATTTATGGCATACACAGATGAAA | |
| cCGA-TGA | CCTTTAAGACTCGTGAAGCTATTCAGCATGAATCAG | |
| | CTGATTCATGCTGAATAGCTTCACGAGTCTTAAAGGTTTCATC | 2149 |
| | TGTGTATGCCATAAATCGGACTTTTTTGTACTTCCTACCAATC | |
| | CGCTGAGGGCCATTGTTCAAATATTGACTTTTATA | |
| | AAAAAGTCCGATTTATG | 2150 |
| | CATAAATCGGACTTTTT | 2151 |
| Haemophilia A | TATTTGAACAATGGCCCTCAGCGGATTGGTAGGAAGTACAAA | 2152 |
| Tyr431Asn | AAAGTCCGATTTATGGCATACACAGATGAAACCTTTAAGACTC | |
| aTAC-AAC | GTGAAGCTATTCAGCATGAATCAGGAATCTTGGGAC | |
| | GTCCCAAGATTCCTGATTCATGCTGAATAGCTTCACGAGTCTT | 2153 |
| | AAAGGTTTCATCTGTGTATGCCATAAATCGGACTTTTTTGTAC | |
| | TTCCTACCAATCCGCTGAGGGCCATTGTTCAAATA | |
| | TTATGGCATACACAGAT | 2154 |
| | ATCTGTGTATGCCATAA | 2155 |
| Haemophilia A | GCCCTCAGCGGATTGGTAGGAAGTACAAAAAAGTCCGATTTA | 2156 |
| Thr435Ile | TGGCATACACAGATGAAACCTTTAAGACTCGTGAAGCTATTCA | |
| ACC-ATC | GCATGAATCAGGAATCTTGGGACCTTTACTTTATGG | |
| | CCATAAAGTAAAGGTCCCAAGATTCCTGATTCATGCTGAATAG | 2157 |
| | CTTCACGAGTCTTAAAGGTTTCATCTGTGTATGCCATAAATCG | |
| | GACTTTTTTGTACTTCCTACCAATCCGCTGAGGGC | |
| | AGATGAAACCTTTAAGA | 2158 |
| | TCTTAAAGGTTTCATCT | 2159 |
| Haemophilia A | ACACAGATGAAACCTTTAAGACTCGTGAAGCTATTCAGCATGA | 2160 |
| Pro451Leu | ATCAGGAATCTTGGGACCTTTACTTTATGGGGAAGTTGGAGA | |
| CCT-CTT | CACACTGTTGGTAAGTTGAAGAAAAGATTTAAGGTC | |
| | GACCTTAAATCTTTTCTTCAACTTACCAACAGTGTGTCTCCAA | 2161 |
| | CTTCCCCATAAAGTAAAGGTCCCAAGATTCCTGATTCATGCTG | |
| | AATAGCTTCACGAGTCTTAAAGGTTTCATCTGTGT | |
| | CTTGGGACCTTTACTTT | 2162 |
| | AAAGTAAAGGTCCCAAG | 2163 |
| Haemophilia A | TACACAGATGAAACCTTTAAGACTCGTGAAGCTATTCAGCATG | 2164 |
| Pro451Thr | AATCAGGAATCTTGGGACCTTTACTTTATGGGGAAGTTGGAG | |
| aCCT-ACT | ACACACTGTTGGTAAGTTGAAGAAAAGATTTAAGGT | |
| | ACCTTAAATCTTTTCTTCAACTTACCAACAGTGTGTCTCCAACT | 2165 |
| | TCCCCATAAAGTAAAGGTCCCAAGATTCCTGATTCATGCTGAA | |
| | TAGCTTCACGAGTCTTAAAGGTTTCATCTGTGTA | |
| | TCTTGGGACCTTTACTT | 2166 |
| | AAGTAAAGGTCCCAAGA | 2167 |
| Haemophilia A | ACCTTTAAGACTCGTGAAGCTATTCAGCATGAATCAGGAATCT | 2168 |
| Gly455Arg | TGGGACCTTTACTTTATGGGGAAGTTGGAGACACACTGTTGG | |
| tGGG-AGG | TAAGTTGAAGAAAAGATTTAAGGTCAGGTAAGAAGA | |
| | TCTTCTTACCTGACCTTAAATCTTTTCTTCAACTTACCAACAGT | 2169 |
| | GTGTCTCCAACTTCCCCATAAAGTAAAGGTCCCAAGATTCCTG | |
| | ATTCATGCTGAATAGCTTCACGAGTCTTAAAGGT | |
| | TACTTTATGGGGAAGTT | 2170 |
| | AACTTCCCCATAAAGTA | 2171 |
| Haemophilia A | CCTTTAAGACTCGTGAAGCTATTCAGCATGAATCAGGAATCTT | 2172 |
| Gly455Glu | GGGACCTTTACTTTATGGGGAAGTTGGAGACACACTGTTGGT | |
| GGG-GAG | AAGTTGAAGAAAAGATTTAAGGTCAGGTAAGAAGAA | |
| | TTCTTCTTACCTGACCTTAAATCTTTTCTTCAACTTACCAACAG | 2173 |
| | TGTGTCTCCAACTTCCCCATAAAGTAAAGGTCCCAAGATTCCT | |
| | GATTCATGCTGAATAGCTTCACGAGTCTTAAAGG | |
| | ACTTTATGGGGAAGTTG | 2174 |
| | CAACTTCCCCATAAAGT | 2175 |
| Haemophilia A | CGTGAAGCTATTCAGCATGAATCAGGAATCTTGGGACCTTTA | 2176 |
| Asp459Asn | CTTTATGGGGAAGTTGGAGACACACTGTTGGTAAGTTGAAGA | |
| aGAC-AAC | AAAGATTTAAGGTCAGGTAAGAAGAAAAAGTCTGGAG | |
| | CTCCAGACTTTTTCTTCTTACCTGACCTTAAATCTTTTCTTCAA | 2177 |
| | CTTACCAACAGTGTGTCTCCAACTTCCCCATAAAGTAAAGGTC | |
| | CCAAGATTCCTGATTCATGCTGAATAGCTTCACG | |
| | AAGTTGGAGACACACTG | 2178 |
| | CAGTGTGTCTCCAACTT | 2179 |
| Haemophilia A | TGTTGATCCTAGTCGTTTTAGGATTTGATCTTAGATCTCGCTTA | 2180 |
| Phe465Cys | TACTTTCAGATTATATTTAAGAATCAAGCAAGCAGACCATATAA | |
| TTT-TGT | CATCTACCCTCACGGAATCACTGATGTCCGTCC | |
| | GGACGGACATCAGTGATTCCGTGAGGGTAGATGTTATATGGT | 2181 |
| | CTGCTTGCTTGATTCTTAAATATAATCTGAAAGTATAAGCGAG | |
| | ATCTAAGATCAAATCCTAAAACGACTAGGATCAACA | |
| | GATTATATTTAAGAATC | 2182 |
| | GATTCTTAAATATAATC | 2183 |
| Haemophilia A | TCGTTTTAGGATTTGATCTTAGATCTCGCTTATACTTTCAGATT | 2184 |
| Ala469Gly | ATATTTAAGAATCAAGCAAGCAGACCATATAACATCTACCCTC | |
| GCA-GGA | ACGGAATCACTGATGTCCGTCCTTTGTATTCAAG | |
| | CTTGAATACAAAGGACGGACATCAGTGATTCCGTGAGGGTAG | 2185 |
| | ATGTTATATGGTCTGCTTGCTTGATTCTTAAATATAATCTGAAA | |
| | GTATAAGCGAGATCTAAGATCAAATCCTAAAACGA | |
| | GAATCAAGCAAGCAGAC | 2186 |
| | GTCTGCTTGCTTGATTC | 2187 |
| Haemophilia A | TTAGGATTTGATCTTAGATCTCGCTTATACTTTCAGATTATATT | 2188 |
| Arg471Gly | TAAGAATCAAGCAAGCAGACCATATAACATCTACCCTCACGG | |
| cAGA-GGA | AATCACTGATGTCCGTCCTTTGTATTCAAGGAGAT | |
| | ATCTCCTTGAATACAAAGGACGGACATCAGTGATTCCGTGAG | 2189 |
| | GGTAGATGTTATATGGTCTGCTTGCTTGATTCTTAAATATAATC | |
| | TGAAAGTATAAGCGAGATCTAAGATCAAATCCTAA | |
| | AAGCAAGCAGACCATAT | 2190 |
| | ATATGGTCTGCTTGCTT | 2191 |
| Haemophilia A | TTGATCTTAGATCTCGCTTATACTTTCAGATTATATTTAAGAAT | 2192 |
| Tyr473Cys | CAAGCAAGCAGACCATATAACATCTACCCTCACGGAATCACT | |
| TAT-TGT | GATGTCCGTCCTTTGTATTCAAGGAGATTACCAAA | |
| | TTTGGTAATCTCCTTGAATACAAAGGACGGACATCAGTGATTC | 2193 |
| | CGTGAGGGTAGATGTTATATGGTCTGCTTGCTTGATTCTTAAA | |
| | TATAATCTGAAAGTATAAGCGAGATCTAAGATCAA | |
| | CAGACCATATAACATCT | 2194 |
| | AGATGTTATATGGTCTG | 2195 |
| Haemophilia A | TTTGATCTTAGATCTCGCTTATACTTTCAGATTATATTTAAGAA | 2196 |
| Tyr473His | TCAAGCAAGCAGACCATATAACATCTACCCTCACGGAATCACT | |
| aTAT-CAT | GATGTCCGTCCTTTGTATTCAAGGAGATTACCAA | |
| | TTGGTAATCTCCTTGAATACAAAGGACGGACATCAGTGATTCC | 2197 |
| | GTGAGGGTAGATGTTATATGGTCTGCTTGCTTGATTCTTAAAT | |
| | ATAATCTGAAAGTATAAGCGAGATCTAAGATCAAA | |
| | GCAGACCATATAACATC | 2198 |
| | GATGTTATATGGTCTGC | 2199 |
| Haemophilia A | TTAGATCTCGCTTATACTTTCAGATTATATTTAAGAATCAAGCA | 2200 |
| Ile475Thr | AGCAGACCATATAACATCTACCCTCACGGAATCACTGATGTCC | |
| ATC-ACC | GTCCTTTGTATTCAAGGAGATTACCAAAAGGTAA | |
| | TTACCTTTTGGTAATCTCCTTGAATACAAAGGACGGACATCAG | 2201 |
| | TGATTCCGTGAGGGTAGATGTTATATGGTCTGCTTGCTTGATT | |
| | CTTAAATATAATCTGAAAGTATAAGCGAGATCTAA | |
| | ATATAACATCTACCCTC | 2202 |
| | GAGGGTAGATGTTATAT | 2203 |
| Haemophilia A | TTATACTTTCAGATTATATTTAAGAATCAAGCAAGCAGACCATA | 2204 |
| Gly479Arg | TAACATCTACCCTCACGGAATCACTGATGTCCGTCCTTTGTAT | |
| cGGA-AGA | TCAAGGAGATTACCAAAAGGTAAATATTCCCTCG | |
| | CGAGGGAATATTTACCTTTTGGTAATCTCCTTGAATACAAAGG | 2205 |
| | ACGGACATCAGTGATTCCGTGAGGGTAGATGTTATATGGTCT | |
| | GCTTGCTTGATTCTTAAATATAATCTGAAAGTATAA | |
| | ACCCTCACGGAATCACT | 2206 |
| | AGTGATTCCGTGAGGGT | 2207 |
| Haemophilia A | CCAATTCTGCCAGGAGAAATATTCAAATATAAATGGACAGTGA | 2208 |
| Thr522Ser | CTGTAGAAGATGGGCCAACTAAATCAGATCCTCGGTGCCTGA | |
| aACT-TCT | CCCGCTATTACTCTAGTTTCGTTAATATGGAGAGAG | |
| | CTCTCTCCATATTAACGAAACTAGAGTAATAGCGGGTCAGGC | 2209 |
| | ACCGAGGATCTGATTTAGTTGGCCCATCTTCTACAGTCACTGT | |
| | CCATTTATATTTGAATATTTCTCCTGGCAGAATTGG | |
| | ATGGGCCAACTAAATCA | 2210 |
| | TGATTTAGTTGGCCCAT | 2211 |
| Haemophilia A | CCAGGAGAAATATTCAAATATAAATGGACAGTGACTGTAGAAG | 2212 |
| Asp525Asn | ATGGGCCAACTAAATCAGATCCTCGGTGCCTGACCCGCTATT | |
| aGAT-AAT | ACTCTAGTTTCGTTAATATGGAGAGAGATCTAGCTT | |
| | AAGCTAGATCTCTCTCCATATTAACGAAACTAGAGTAATAGCG | 2213 |
| | GGTCAGGCACCGAGGATCTGATTTAGTTGGCCCATCTTCTAC | |
| | AGTCACTGTCCATTTATATTTGAATATTTCTCCTGG | |
| | CTAAATCAGATCCTCGG | 2214 |
| | CCGAGGATCTGATTTAG | 2215 |
| Haemophilia A | GAAATATTCAAATATAAATGGACAGTGACTGTAGAAGATGGGC | 2216 |
| Arg527Trp | CAACTAAATCAGATCCTCGGTGCCTGACCCGCTATTACTCTAG | |
| tCGG-TGG | TTTCGTTAATATGGAGAGAGATCTAGCTTCAGGAC | |
| | GTCCTGAAGCTAGATCTCTCTCCATATTAACGAAACTAGAGTA | 2217 |
| | ATAGCGGGTCAGGCACCGAGGATCTGATTTAGTTGGCCCATC | |
| | TTCTACAGTCACTGTCCATTTATATTTGAATATTTC | |
| | CAGATCCTCGGTGCCTG | 2218 |
| | CAGGCACCGAGGATCTG | 2219 |
| Haemophilia A | TATAAATGGACAGTGACTGTAGAAGATGGGCCAACTAAATCA | 2220 |
| Arg531Cys | GATCCTCGGTGCCTGACCCGCTATTACTCTAGTTTCGTTAATA | |
| cCGC-TGC | TGGAGAGAGATCTAGCTTCAGGACTCATTGGCCCTC | |
| | GAGGGCCAATGAGTCCTGAAGCTAGATCTCTCTCCATATTAA | 2221 |
| | CGAAACTAGAGTAATAGCGGGTCAGGCACCGAGGATCTGATT | |
| | TAGTTGGCCCATCTTCTACAGTCACTGTCCATTTATA | |
| | GCCTGACCCGCTATTAC | 2222 |
| | GTAATAGCGGGTCAGGC | 2223 |
| Haemophilia A | TATAAATGGACAGTGACTGTAGAAGATGGGCCAACTAAATCA | 2224 |
| Arg531Gly | GATCCTCGGTGCCTGACCCGCTATTACTCTAGTTTCGTTAATA | |
| cCGC-GGC | TGGAGAGAGATCTAGCTTCAGGACTCATTGGCCCTC | |
| | GAGGGCCAATGAGTCCTGAAGCTAGATCTCTCTCCATATTAA | 2225 |
| | CGAAACTAGAGTAATAGCGGGTCAGGCACCGAGGATCTGATT | |
| | TAGTTGGCCCATCTTCTACAGTCACTGTCCATTTATA | |
| | GCCTGACCCGCTATTAC | 2226 |
| | GTAATAGCGGGTCAGGC | 2227 |
| Haemophilia A | ATAAATGGACAGTGACTGTAGAAGATGGGCCAACTAAATCAG | 2228 |
| Arg531His | ATCCTCGGTGCCTGACCCGlCTATTACTCTAGTTTCGTTAATAT | |
| CGC-CAC | GGAGAGAGATCTAGCTTCAGGACTCATTGGCCCTCT | |
| | AGAGGGCCAATGAGTCCTGAAGCTAGATCTCTCTCCATATTA | 2229 |
| | ACGAAACTAGAGTAATAGCGGGTCAGGCACCGAGGATCTGAT | |
| | TTAGTTGGCCCATCTTCTACAGTCACTGTCCATTTAT | |
| | CCTGACCCGCTATTACT | 2230 |
| | AGTAATAGCGGGTCAGG | 2231 |
| Haemophilia A | ACAGTGACTGTAGAAGATGGGCCAACTAAATCAGATCCTCGG | 2232 |
| Ser534Pro | TGCCTGACCCGCTATTACTCTAGTTTCGTTAATATGGAGAGAG | |
| cTCT-CCT | ATCTAGCTTCAGGACTCATTGGCCCTCTCCTCATCT | |
| | AGATGAGGAGAGGGCCAATGAGTCCTGAAGCTAGATCTCTCT | 2233 |
| | CCATATTAACGAAACTAGAGTAATAGCGGGTCAGGCACCGAG | |
| | GATCTGATTTAGTTGGCCCATCTTCTACAGTCACTGT | |
| | GCTATTACTCTAGTTTC | 2234 |
| | GAAACTAGAGTAATAGC | 2235 |
| Haemophilia A | GTGACTGTAGAAGATGGGCCAACTAAATCAGATCCTCGGTGC | 2236 |
| Ser535Gly | CTGACCCGCTATTACTCTAGTTTCGTTAATATGGAGAGAGATC | |
| tAGT-GGT | TAGCTTCAGGACTCATTGGCCCTCTCCTCATCTGCT | |
| | AGCAGATGAGGAGAGGGCCAATGAGTCCTGAAGCTAGATCT | 2237 |
| | CTCTCCATATTAACGAAACTAGAGTAATAGCGGGTCAGGCAC | |
| | CGAGGATCTGATTTAGTTGGCCCATCTTCTACAGTCAC | |
| | ATTACTCTAGTTTCGTT | 2238 |
| | AACGAAACTAGAGTAAT | 2239 |
| Haemophilia A | TAGAAGATGGGCCAACTAAATCAGATCCTCGGTGCCTGACCC | 2240 |
| Val537Asp | GCTATTACTCTAGTTTCGTTAATATGGAGAGAGATCTAGCTTC | |
| GTT-GAT | AGGACTCATTGGCCCTCTCCTCATCTGCTACAAAGA | |
| | TCTTTGTAGCAGATGAGGAGAGGGCCAATGAGTCCTGAAGCT | 2241 |
| | AGATCTCTCTCCATATTAACGAAACTAGAGTAATAGCGGGTCA | |
| | GGCACCGAGGATCTGATTTAGTTGGCCCATCTTCTA | |
| | TAGTTTCGTTAATATGG | 2242 |
| | CCATATTAACGAAACTA | 2243 |
| Haemophilia A | CAACTAAATCAGATCCTCGGTGCCTGACCCGCTATTACTCTAG | 2244 |
| Arg541Thr | TTTCGTTAATATGGAGAGAGATCTAGCTTCAGGACTCATTGGC | |
| AGA-ACA | CCTCTCCTCATCTGCTACAAAGAATCTGTAGATCA | |
| | TGATCTACAGATTCTTTGTAGCAGATGAGGAGAGGGCCAATG | 2245 |
| | AGTCCTGAAGCTAGATCTCTCTCCATATTAACGAAACTAGAGT | |
| | AATAGCGGGTCAGGCACCGAGGATCTGATTTAGTTG | |
| | TATGGAGAGAGATCTAG | 2246 |
| | CTAGATCTCTCTCCATA | 2247 |
| Haemophilia A | CTAAATCAGATCCTCGGTGCCTGACCCGCTATTACTCTAGTTT | 2248 |
| Asp542Gly | CGTTAATATGGAGAGAGATCTAGCTTCAGGACTCATTGGCCC | |
| GAT-GGT | TCTCCTCATCTGCTACAAAGAATCTGTAGATCAAAG | |
| | CTTTGATCTACAGATTCTTTGTAGCAGATGAGGAGAGGGCCA | 2249 |
| | ATGAGTCCTGAAGCTAGATCTCTCTCCATATTAACGAAACTAG | |
| | AGTAATAGCGGGTCAGGCACCGAGGATCTGATTTAG | |
| | GGAGAGAGATCTAGCTT | 2250 |
| | AAGCTAGATCTCTCTCC | 2251 |
| Haemophilia A | ACTAAATCAGATCCTCGGTGCCTGACCCGCTATTACTCTAGTT | 2252 |
| Asp542His | TCGTTAATATGGAGAGAGATCTAGCTTCAGGACTCATTGGCC | |
| aGAT-CAT | CTCTCCTCATCTGCTACAAAGAATCTGTAGATCAAA | |
| | TTTGATCTACAGATTCTTTGTAGCAGATGAGGAGAGGGCCAA | 2253 |
| | TGAGTCCTGAAGCTAGATCTCTCTCCATATTAACGAAACTAGA | |
| | GTAATAGCGGGTCAGGCACCGAGGATCTGATTTAGT | |
| | TGGAGAGAGATCTAGCT | 2254 |
| | AGCTAGATCTCTCTCCA | 2255 |
| Haemophilia A | ACTAAATCAGATCCTCGGTGCCTGACCCGCTATTACTCTAGTT | 2256 |
| Asp542Tyr | TCGTTAATATGGAGAGAGATCTAGCTTCAGGACTCATTGGCC | |
| aGAT-TAT | CTCTCCTCATCTGCTACAAAGAATCTGTAGATCAAA | |
| | TTTGATCTACAGATTCTTTGTAGCAGATGAGGAGAGGGCCAA | 2257 |
| | TGAGTCCTGAAGCTAGATCTCTCTCCATATTAACGAAACTAGA | |
| | GTAATAGCGGGTCAGGCACCGAGGATCTGATTTAGT | |
| | TGGAGAGAGATCTAGCT | 2258 |
| | AGCTAGATCTCTCTCCA | 2259 |
| Haemophilia A | GTTAATATGGAGAGAGATCTAGCTTCAGGACTCATTGGCCCT | 2260 |
| Glu551Term | CTCCTCATCTGCTACAAAGAATCTGTAGATCAAAGAGGAAACC | |
| aGAA-TAA | AGGTGAGTTCTTGCCTTTCCAAGTGCTGGGTTTCAT | |
| | ATGAAACCCAGCACTTGGAAAGGCAAGAACTCACCTGGTTTC | 2261 |
| | CTCTTTGATCTACAGATTCTTTGTAGCAGATGAGGAGAGGGC | |
| | CAATGAGTCCTGAAGCTAGATCTCTCTCCATATTAAC | |
| | GCTACAAAGAATCTGTA | 2262 |
| | TACAGATTCTTTGTAGC | 2263 |
| Haemophilia A | ATATGGAGAGAGATCTAGCTTCAGGACTCATTGGCCCTCTCC | 2264 |
| Ser558Phe | TCATCTGCTACAAAGAATCTGTAGATCAAAGAGGAAACCAGG | |
| TCT-TTT | TGAGTTCTTGCCTTTCCAAGTGCTGGGTTTCATTCTC | |
| | GAGAATGAAACCCAGCACTTGGAAAGGCAAGAACTCACCTGG | 2265 |
| | TTTCCTCTTTGATCTACAGATTCTTTGTAGCAGATGAGGAGAG | |
| | GGCCAATGAGTCCTGAAGCTAGATCTCTCTCCATAT | |
| | CAAAGAATCTGTAGATC | 2266 |
| | GATCTACAGATTCTTTG | 2267 |
| Haemophilia A | TGGAGAGAGATCTAGCTTCAGGACTCATTGGCCCTCTCCTCA | 2268 |
| Val559Ala | TCTGCTACAAAGAATCTGTAGATCAAAGAGGAAACCAGGTGA | |
| GTA-GCA | GTTCTTGCCTTTCCAAGTGCTGGGTTTCATTCTCAGT | |
| | ACTGAGAATGAAACCCAGCACTTGGAAAGGCAAGAACTCACC | 2269 |
| | TGGTTTCCTCTTTGATCTACAGATTCTTTGTAGCAGATGAGGA | |
| | GAGGGCCAATGAGTCCTGAAGCTAGATCTCTCTCCA | |
| | AGAATCTGTAGATCAAA | 2270 |
| | TTTGATCTACAGATTCT | 2271 |

### EXAMPLE 15

### Hemophilia—Factor IX Deficiency

[0230] The attached table discloses the correcting oligonucleotide base sequences for the Factor IX oligonucleotides of the invention.

TABLE 17
Factor IX Mutations And Genome-Correcting Oligos

| Clinical Phenotype & | | SEQ ID |
|---|---|---|
| Mutation | Correcting Oligos | NO: |
| Haemophilia B | ATTTCAGTTTTTCTTGATCATGAAAACGCCAACAAAATTCTGAA | 2272 |
| Asn2Asp | TCGGCCAAAGAGGTATAATTCAGGTAAATTGGAAGAGTTTGTT | |
| tAAT-GAT | CAAGGGAACCTTGAGAGAGAATGTATGGAAGAAA | |
| | TTTCTTCCATACATTCTCTCTCAAGGTTCCCTTGAACAAACTCT | 2273 |
| | TCCAATTTACCTGAATTATACCTCTTTGGCCGATTCAGAATTTT | |
| | GTTGGCGTTTTCATGATCAAGAAAAACTGAAAT | |
| | AGAGGTATAATTCAGGT | 2274 |
| | ACCTGAATTATACCTCT | 2275 |
| Haemophilia B | TTTCAGTTTTTCTTGATCATGAAAACGCCAACAAAATTCTGAAT | 2276 |
| Asn2Ile | CGGCCAAAGAGGTATAATTCAGGTAAATTGGAAGAGTTTGTT | |
| AAT-ATT | CAAGGGAACCTTGAGAGAGAATGTATGGAAGAAAA | |
| | TTTTCTTCCATACATTCTCTCTCAAGGTTCCCTTGAACAAACTC | 2277 |
| | TTCCAATTTACCTGAATTATACCTCTTTGGCCGATTCAGAATTT | |
| | TGTTGGCGTTTTCATGATCAAGAAAAACTGAAA | |
| | GAGGTATAATTCAGGTA | 2278 |
| | TACCTGAATTATACCTC | 2279 |
| Haemophilia B | ATTTCAGTTTTTCTTGATCATGAAAACGCCAACAAAATTCTGAA | 2280 |
| Asn2Tyr | TCGGCCAAAGAGGTATAATTCAGGTAAATTGGAAGAGTTTGTT | |
| tAAT-TAT | CAAGGGAACCTTGAGAGAGAATGTATGGAAGAAA | |
| | TTTCTTCCATACATTCTCTCTCAAGGTTCCCTTGAACAAACTCT | 2281 |
| | TCCAATTTACCTGAATTATACCTCTTTGGCCGATTCAGAATTTT | |
| | GTTGGCGTTTTCATGATCAAGAAAAACTGAAAT | |
| | AGAGGTATAATTCAGGT | 2282 |
| | ACCTGAATTATACCTCT | 2283 |
| Haemophilia B | TCAGTTTTTCTTGATCATGAAAACGCCAACAAAATTCTGAATC | 2284 |
| Ser3Pro | GGCCAAAGAGGTATAATTCAGGTAAATTGGAAGAGTTTGTTC | |
| tTCA-CCA | AAGGGAACCTTGAGAGAGAATGTATGGAAGAAAAGT | |
| | ACTTTTCTTCCATACATTCTCTCTCAAGGTTCCCTTGAACAAAC | 2285 |
| | TCTTCCAATTTACCTGAATTATACCTCTTTGGCCGATTCAGAAT | |
| | TTTGTTGGCGTTTTCATGATCAAGAAAAACTGA | |
| | GGTATAATTCAGGTAAA | 2286 |
| | TTTACCTGAATTATACC | 2287 |
| Haemophilia B | TTTTTCTTGATCATGAAAACGCCAACAAAATTCTGAATCGGCC | 2288 |
| Gly4Asp | AAAGAGGTATAATTCAGGTAAATTGGAAGAGTTTGTTCAAGG | |
| GGT-GAT | GAACCTTGAGAGAGAATGTATGGAAGAAAAGTGTAG | |
| | CTACACTTTTCTTCCATACATTCTCTCTCAAGGTTCCCTTGAAC | 2289 |
| | AAACTCTTCCAATTTACCTGAATTATACCTCTTTGGCCGATTCA | |
| | GAATTTTGTTGGCGTTTTCATGATCAAGAAAAA | |
| | TAATTCAGGTAAATTGG | 2290 |
| | CCAATTTACCTGAATTA | 2291 |
| Haemophilia B | GTTTTTCTTGATCATGAAAACGCCAACAAAATTCTGAATCGGC | 2292 |
| Gly4Ser | CAAAGAGGTATAATTCAGGTAAATTGGAAGAGTTTGTTCAAGG | |
| aGGT-AGT | GAACCTTGAGAGAGAATGTATGGAAGAAAAGTGTA | |
| | TACACTTTTCTTCCATACATTCTCTCTCAAGGTTCCCTTGAACA | 2293 |
| | AACTCTTCCAATTTACCTGAATTATACCTCTTTGGCCGATTCA | |
| | GAATTTTGTTGGCGTTTTCATGATCAAGAAAAAC | |
| | ATAATTCAGGTAAATTG | 2294 |
| | CAATTTACCTGAATTAT | 2295 |
| Haemophilia B | TTTCTTGATCATGAAAACGCCAACAAAATTCTGAATCGGCCAA | 2296 |
| LysSGlu | AGAGGTATAATTCAGGTAAATTGGAAGAGTTTGTTCAAGGGA | |
| tAAA-GAA | ACCTTGAGAGAGAATGTATGGAAGAAAAGTGTAGTT | |
| | AACTACACTTTTCTTCCATACATTCTCTCTCAAGGTTCCCTTGA | 2297 |
| | ACAAACTCTTCCAATTTACCTGAATTATACCTCTTTGGCCGATT | |
| | CAGAATTTTGTTGGCGTTTTCATGATCAAGAAA | |
| | ATTCAGGTAAATTGGAA | 2298 |
| | TTCCAATTTACCTGAAT | 2299 |
| Haemophilia B | ATCATGAAAACGCCAACAAAATTCTGAATCGGCCAAAGAGGT | 2300 |
| Glu7Ala | ATAATTCAGGTAAATTGGAAGAGTTTGTTCAAGGGAACCTTGA | |
| GAA-GCA | GAGAGAATGTATGGAAGAAAAGTGTAGTTTTGAAGA | |
| | TCTTCAAAACTACACTTTTCTTCCATACATTCTCTCTCAAGGTT | 2301 |
| | CCCTTGAACAAACTCTTCCAATTTACCTGAATTATACCTCTTTG | |
| | GCCGATTCAGAATTTTGTTGGCGTTTTCATGAT | |
| | TAAATTGGAAGAGTTTG | 2302 |
| | CAAACTCTTCCMTTTA | 2303 |
| Haemophilia B | GATCATGAAAACGCCAACAAAATTCTGAATCGGCCAAAGAGG | 2304 |
| Glu7Lys | TATAATTCAGGTAAATTGGAAGAGTTTGTTCAAGGGAACCTTG | |
| gGAA-AAA | AGAGAGAATGTATGGAAGAAAAGTGTAGTTTTGAAG | |
| | CTTCAAAACTACACTTTTCTTCCATACATTCTCTCTCAAGGTTC | 2305 |
| | CCTTGAACAAACTCTTCCAATTTACCTGAATTATACCTCTTTGG | |
| | CCGATTCAGAATTTTGTTGGCGTTTTCATGATC | |
| | GTAAATTGGAAGAGTTT | 2306 |
| | AAACTCTTCCAATTTAC | 2307 |
| Haemophilia B | ATCATGAAAACGCCAACAAAATTCTGAATCGGCCAAAGAGGT | 2308 |
| Glu7Val | ATAATTCAGGTAAATTGGAAGAGTTTGTTCAAGGGAACCTTGA | |
| GAA-GTA | GAGAGAATGTATGGAAGAAAAGTGTAGTTTTGAAGA | |
| | TCTTCAAAACTACACTTTTCTTCCATACATTCTCTCTCAAGGTT | 2309 |
| | CCCTTGAACAAACTCTTCCAATTTACCTGAATTATACCTCTTTG | |
| | GCCGATTCAGAATTTTGTTGGCGTTTTCATGAT | |
| | TAAATTGGAAGAGTTTG | 2310 |
| | CAAACTCTTCCAATTTA | 2311 |
| Haemophilia B | ATGAAAACGCCAACAAAATTCTGAATCGGCCAAAGAGGTATA | 2312 |
| Glu8Ala | ATTCAGGTAAATTGGAAGAGTTTGTTCAAGGGAACCTTGAGA | |
| GAG-GCG | GAGAATGTATGGAAGAAAAGTGTAGTTTTGAAGAAGC | |
| | GCTTCTTCAAAACTACACTTTTCTTCCATACATTCTCTCTCAAG | 2313 |
| | GTTCCCTTGAACAAACTCTTCCAATTTACCTGAATTATACCTCT | |
| | TTGGCCGATTCAGAATTTTGTTGGCGTTTTCAT | |
| | ATTGGAAGAGTTTGTTC | 2314 |
| | GAACAAACTCTTCCAAT | 2315 |
| Haemophilia B | ATGAAAACGCCAACAAAATTCTGAATCGGCCAAAGAGGTATA | 2316 |
| Glu8Gly | ATTCAGGTAAATTGGAAGAGTTTGTTCAAGGGAACCTTGAGA | |
| GAG-GGG | GAGAATGTATGGAAGAAAAGTGTAGTTTTGAAGAAGC | |
| | GCTTCTTCAAAACTACACTTTTCTTCCATACATTCTCTCTCAAG | 2317 |
| | GTTCCCTTGAACAAACTCTTCCAATTTACCTGAATTATACCTCT | |
| | TTGGCCGATTCAGAATTTTGTTGGCGTTTTCAT | |
| | ATTGGAAGAGTTTGTTC | 2318 |
| | GAACAAACTCTTCCAAT | 2319 |
| Haemophilia B | AAAACGCCAACAAAATTCTGAATCGGCCAAAGAGGTATAATTC | 2320 |
| Phe9Cys | AGGTAAATTGGAAGAGTTTGTTCAAGGGAACCTTGAGAGAGA | |
| TTT-TGT | ATGTATGGAAGAAAAGTGTAGTTTTGAAGAAGCACG | |
| | CGTGCTTCTTCAAAACTACACTTTTCTTCCATACATTCTCTCTC | 2321 |
| | AAGGTTCCCTTGAACAAACTCTTCCAATTTACCTGAATTATAC | |
| | CTCTTTGGCCGATTCAGAATTTTGTTGGCGTTTT | |
| | GGAAGAGTTTGTTCAAG | 2322 |
| | CTTGAACAAACTCTTCC | 2323 |
| Haemophilia B | GAAAACGCCAACAAAATTCTGAATCGGCCAAAGAGGTATAAT | 2324 |
| Phe9Ile | TCAGGTAAATTGGAAGAGTTTGTTCAAGGGAACCTTGAGAGA | |
| gTTT-ATT | GAATGTATGGAAGAAAAGTGTAGTTTTGAAGAAGCAC | |
| gTTT-ATT | GTGCTTCTTCAAAACTACACTTTTCTTCCATACATTCTCTCTCA | 2325 |
| | AGGTTCCCTTGAACAAACTCTTCCAATTTACCTGAATTATACC | |
| | TCTTTGGCCGATTCAGAATTTTGTTGGCGTTTTC | |
| | TGGAAGAGTTTGTTCAA | 2326 |
| | TTGAACAAACTCTTCCA | 2327 |
| Haemophilia B | TTACATTTCAGTTTTTCTTGATCATGAAAACGCCAACAAAATTC | 2328 |
| Arg(−1)Ser | TGAATCGGCCAAAGAGGTATAATTCAGGTAAATTGGAAGAGT | |
| AGGt-AGC | TTGTTCAAGGGAACCTTGAGAGAGAATGTATGGAA | |
| | TTCCATACATTCTCTCTCAAGGTTCCCTTGAACAAACTCTTCC | 2329 |
| | AATTTACCTGAATTATACCTCTTTGGCCGATTCAGAATTTTGTT | |
| | GGCGTTTTCATGATCAAGAAAAACTGAAATGTAA | |
| | CCAAAGAGGTATAATTC | 2330 |
| | GAATTATACCTCTTTGG | 2331 |
| Haemophilia B | TTTACATTTCAGTTTTTCTTGATCATGAAAACGCCAACAAAATT | 2332 |
| Arg(−1)Thr | CTGAATCGGCCAAAGAGGTATAATTCAGGTAAATTGGAAGAG | |
| AGG-ACG | TTTGTTCAAGGGAACCTTGAGAGAGAATGTATGGA | |
| | TCCATACATTCTCTCTCAAGGTTCCCTTGAACAAACTCTTCCA | 2333 |
| | ATTTACCTGAATTATACCTCTTTGGCCGATTCAGAATTTTGTTG | |
| | GCGTTTTCATGATCAAGAAAAACTGAAATGTAAA | |
| | GCCAAAGAGGTATAATT | 2334 |
| | AATTATACCTCTTTGGC | 2335 |
| Haemophilia B | CTTTTACATTTCAGTTTTTCTTGATCATGAAAACGCCAACAAAA | 2336 |
| Lys(−2)Asn | TTCTGAATCGGCCAAAGAGGTATAATTCAGGTAAATTGGAAG | |
| AAGa-AAT | AGTTTGTTCAAGGGAACCTTGAGAGAGAATGTATG | |
| | CATACATTCTCTCTCAAGGTTCCCTTGAACAAACTCTTCCAATT | 2337 |
| | TACCTGAATTATACCTCTTTGGCCGATTCAGAATTTTGTTGGC | |
| | GTTTTCATGATCAAGAAAAACTGAAATGTAAAAG | |
| | CGGCCAAAGAGGTATAA | 2338 |
| | TTATACCTCTTTGGCCG | 2339 |
| Haemophilia B | AATTATTCTTTTACATTTCAGTTTTTCTTGATCATGAAAACGCC | 2340 |
| Arg(−4)Gln | AACAAAATTCTGAATCGGCCAAAGAGGTATAATTCAGGTAAAT | |
| CGG-CAG | TGGAAGAGTTTGTTCAAGGGAACCTTGAGAGAGA | |
| | TCTCTCTCAAGGTTCCCTTGAACAAACTCTTCCAATTTACCTG | 2341 |
| | AATTATACCTCTTTGGCCGATTCAGAATTTTGTTGGCGTTTTC | |
| | ATGATCAAGAAAAACTGAAATGTAAAAGAATAATT | |
| | TCTGAATCGGCCAAAGA | 2342 |
| | TCTTTGGCCGATTCAGA | 2343 |
| Haemophilia B | AATTATTCTTTTACATTTCAGTTTTTCTTGATCATGAAAACGCC | 2344 |
| Arg(−4)Leu | AACAAAATTCTGAATCGGCCAAAGAGGTATAATTCAGGTAAAT | |
| CGG-CTG | TGGAAGAGTTTGTTCAAGGGAACCTTGAGAGAGA | |
| | TCTCTCTCAAGGTTCCCTTGAACAAACTCTTCCAATTTACCTG | 2345 |
| | AATTATACCTCTTTGGCCGATTCAGAATTTTGTTGGCGTTTTC | |
| | ATGATCAAGAAAAACTGAAATGTAAAAGAATAATT | |
| | TCTGAATCGGCCAAAGA | 2346 |
| | TCTTTGGCCGATTCAGA | 2347 |
| Haemophilia B | GAATTATTCTTTTACATTTCAGTTTTTCTTGATCATGAAAACGC | 2348 |
| Arg(−4)Trp | CAACAAAATTCTGAATCGGCCAAAGAGGTATAATTCAGGTAAA | |
| tCGG-TGG | TTGGAAGAGTTTGTTCAAGGGAACCTTGAGAGAG | |
| | CTCTCTCAAGGTTCCCTTGAACAAACTCTTCCAATTTACCTGA | 2349 |
| | ATTATACCTCTTTGGCCGATTCAGAATTTTGTTGGCGTTTTCAT | |
| | GATCAAGAAAAACTGAAATGTAAAAGAATAATTC | |
| | TTCTGAATCGGCCAAAG | 2350 |
| | CTTTGGCCGATTCAGAA | 2351 |
| Haemophilia B | GCCAACAAAATTCTGAATCGGCCAAAGAGGTATAATTCAGGT | 2352 |
| GinllTerm | AAATTGGAAGAGTTTGTTCAAGGGAACCTTGAGAGAGAATGT | |
| tCAA-TAA | ATGGAAGAAAAGTGTAGTTTTGAAGAAGCACGAGAAG | |
| | CTTCTCGTGCTTCTTCAAAACTACACTTTTCTTCCATACATTCT | 2353 |
| | CTCTCAAGGTTCCCTTGAACAAACTCTTCCAATTTACCTGAAT | |
| | TATACCTCTTTGGCCGATTCAGAATTTTGTTGGC | |
| | AGTTTGTTCAAGGGAAC | 2354 |
| | GTTCCCTTGAACAAACT | 2355 |
| Haemophilia B | ACAAAATTCTGAATCGGCCAAAGAGGTATAATTCAGGTAAATT | 2356 |
| Gly12Ala | GGAAGAGTTTGTTCAAGGGAACCTTGAGAGAGAATGTATGGA | |
| GGG-GCG | AGAAAAGTGTAGTTTTGAAGAAGCACGAGAAGTTTT | |
| | AAAACTTCTCGTGCTTCTTCAAAACTACACTTTTCTTCCATACA | 2357 |
| | TTCTCTCTCAAGGTTCCCTTGAACAAACTCTTCCAATTTACCT | |
| | GAATTATACCTCTTTGGCCGATTCAGAATTTTGT | |
| | TGTTCAAGGGAACCTTG | 2358 |
| | CAAGGTTCCCTTGAACA | 2359 |
| Haemophilia B | AACAAAATTCTGAATCGGCCAAAGAGGTATAATTCAGGTAAAT | 2360 |
| Gly12Arg | TGGAAGAGTTTGTTCAAGGGAACCTTGAGAGAGAATGTATGG | |
| aGGG-AGG | AAGAAAAGTGTAGTTTTGAAGAAGCACGAGAAGTTT | |
| | AAACTTCTCGTGCTTCTTCAAAACTACACTTTTCTTCCATACAT | 2361 |
| | TCTCTCTCAAGGTTCCCTTGAACAAACTCTTCCAATTTACCTG | |
| | AATTATACCTCTTTGGCCGATTCAGAATTTTGTT | |
| | TTGTTCAAGGGAACCTT | 2362 |
| | AAGGTTCCCTTGAACAA | 2363 |
| Haemophilia B | ACAAAATTCTGAATCGGCCAAAGAGGTATAATTCAGGTAAATT | 2364 |
| Gly12Glu | GGAAGAGTTTGTTCAAGGGAACCTTGAGAGAGAATGTATGGA | |
| GGG-GAG | AGAAAAGTGTAGTTTTGAAGAAGCACGAGAAGTTTT | |
| | AAAACTTCTCGTGCTTCTTCAAAACTACACTTTTCTTCCATACA | 2365 |
| | TTCTCTCTCAAGGTTCCCTTGAACAAACTCTTCCAATTTACCT | |
| | GAATTATACCTCTTTGGCCGATTCAGAATTTTGT | |
| | TGTTCAAGGGAACCTTG | 2366 |
| | CAAGGTTCCCTTGAACA | 2367 |
| Haemophilia B | CGGCCAAAGAGGTATAATTCAGGTAAATTGGAAGAGTTTGTT | 2368 |
| Glu17Gln | CAAGGGAACCTTGAGAGAGAATGTATGGAAGAAAAGTGTAGT | |
| aGAA-CAA | TTTGAAGAAGCACGAGAAGTTTTTGAAAACACTGAAA | |
| | TTTCAGTGTTTTCAAAAACTTCTCGTGCTTCTTCAAAACTACAC | 2369 |
| | TTTTCTTCCATACATTCTCTCTCAAGGTTCCCTTGAACAAACTC | |
| | TTCCAATTTACCTGAATTATACCTCTTTGGCCG | |
| | TTGAGAGAGAATGTATG | 2370 |
| | CATACATTCTCTCTCAA | 2371 |
| Haemophilia B | CGGCCAAAGAGGTATAATTCAGGTAAATTGGAAGAGTTTGTT | 2372 |
| Glu17Lys | CAAGGGAACCTTGAGAGAGAATGTATGGAAGAAAAGTGTAGT | |
| aGAA-AAA | TTTGAAGAAGCACGAGAAGTTTTTGAAAACACTGAAA | |
| | TTTCAGTGTTTTCAAAAACTTCTCGTGCTTCTTCAAAACTACAC | 2373 |
| | TTTTCTTCCATACATTCTCTCTCAAGGTTCCCTTGAACAAACTC | |
| | TTCCAATTTACCTGAATTATACCTCTTTGGCCG | |
| | TTGAGAGAGAATGTATG | 2374 |
| | CATACATTCTCTCTCAA | 2375 |
| Haemophilia B | CCAAAGAGGTATAATTCAGGTAAATTGGAAGAGTTTGTTCAAG | 2376 |
| Cys18Arg | GGAACCTTGAGAGAGAATGTATGGAAGAAAAGTGTAGTTTTG | |
| aTGT-CGT | AAGAAGCACGAGAAGTTTTTGAAAACACTGAAAGAA | |
| | TTCTTTCAGTGTTTTCAAAAACTTCTCGTGCTTCTTCAAAACTA | 2377 |
| | CACTTTTCTTCCATACATTCTCTCTCAAGGTTCCCTTGAACAAA | |
| | CTCTTCCAATTTACCTGAATTATACCTCTTTGG | |
| | AGAGAGAATGTATGGAA | 2378 |
| | TTCCATACATTCTCTCT | 2379 |
| Haemophilia B | CAAAGAGGTATAATTCAGGTAAATTGGAAGAGTTTGTTCAAGG | 2380 |
| Cys18Tyr | GAACCTTGAGAGAGAATGTATGGAAGAAAAGTGTAGTTTTGA | |
| TGT-TAT | AGAAGCACGAGAAGTTTTTGAAAACACTGAAAGAAC | |
| | GTTCTTTCAGTGTTTTCAAAAACTTCTCGTGCTTCTTCAAAACT | 2381 |
| | ACACTTTTCTTCCATACATTCTCTCTCAAGGTTCCCTTGAACAA | |
| | ACTCTTCCAATTTACCTGAATTATACCTCTTTG | |
| | GAGAGAATGTATGGAAG | 2382 |
| | CTTCCATACATTCTCTC | 2383 |
| Haemophilia B | GGTATAATTCAGGTAAATTGGAAGAGTTTGTTCAAGGGAACCT | 2384 |
| Glu20Val | TGAGAGAGAATGTATGGAAGAAAAGTGTAGTTTTGAAGAAGC | |
| GAA-GTA | ACGAGAAGTTTTTGAAAACACTGAAAGAACAGTGAG | |
| | CTCACTGTTCTTTCAGTGTTTTCAAAAACTTCTCGTGCTTCTTC | 2385 |
| | AAAACTACACTTTTCTTCCATACATTCTCTCTCAAGGTTCCCTT | |
| | GAACAAACTCTTCCAATTTACCTGAATTATACC | |
| | ATGTATGGAAGAAAAGT | 2386 |
| | ACTTTTCTTCCATACAT | 2387 |
| Haemophilia B | TATAATTCAGGTAAATTGGAAGAGTTTGTTCAAGGGAACCTTG | 2388 |
| Glu21Lys | AGAGAGAATGTATGGAAGAAAAGTGTAGTTTTGAAGAAGCAC | |
| aGAA-AAA | GAGAAGTTTTTGAAAACACTGAAAGAACAGTGAGTA | |
| | TACTCACTGTTCTTTCAGTGTTTTCAAAAACTTCTCGTGCTTCT | 2389 |
| | TCAAAACTACACTTTTCTTCCATACATTCTCTCTCAAGGTTCCC | |
| | TTGAACAAACTCTTCCAATTTACCTGAATTATA | |
| | GTATGGAAGAAAAGTGT | 2390 |
| | ACACTTTTCTTCCATAC | 2391 |
| Haemophilia B | TCAGGTAAATTGGAAGAGTTTGTTCAAGGGAACCTTGAGAGA | 2392 |
| Cys23Arg | GAATGTATGGAAGAAAAGTGTAGTTTTGAAGAAGCACGAGAA | |
| gTGT-CGT | GTTTTTGAAAACACTGAAAGAACAGTGAGTATTTCCA | |
| | TGGAAATACTCACTGTTCTTTCAGTGTTTTCAAAAACTTCTCGT | 2393 |
| | GCTTCTTCAAAACTACACTTTTCTTCCATACATTCTCTCTCAAG | |
| | GTTCCCTTGAACAAACTCTTCCAATTTACCTGA | |
| | AAGAAAAGTGTAGTTTT | 2394 |
| | AAAACTACACTTTTCTT | 2395 |
| Haemophilia B | CAGGTAAATTGGAAGAGTTTGTTCAAGGGAACCTTGAGAGAG | 2396 |
| Cys23Tyr | AATGTATGGAAGAAAAGTGTAGTTTTGAAGAAGCACGAGAAG | |
| TGT-TAT | TTTTTGAAAACACTGAAAGAACAGTGAGTATTTCCAC | |
| | GTGGAAATACTCACTGTTCTTTCAGTGTTTTCAAAAACTTCTC | 2397 |
| | GTGCTTCTTCAAAACTACACTTTTCTTCCATACATTCTCTCTCA | |
| | AGGTTCCCTTGAACAAACTCTTCCAATTTACCTG | |
| | AGAAAAGTGTAGTTTTG | 2398 |
| | CAAAACTACACTTTTCT | 2399 |
| Haemophilia B | AATTGGAAGAGTTTGTTCAAGGGAACCTTGAGAGAGAATGTA | 2400 |
| Phe25Ser | TGGAAGAAAAGTGTAGTTTTGAAGAAGCACGAGAAGTTTTTG | |
| TTT-TCT | AAAACACTGAAAGAACAGTGAGTATTTCCACATAATA | |
| | TATTATGTGGAAATACTCACTGTTCTTTCAGTGTTTTCAAAAAC | 2401 |
| | TTCTCGTGCTTCTTCAAAACTACACTTTTCTTCCATACATTCTC | |
| | TCTCAAGGTTCCCTTGAACAAACTCTTCCAATT | |
| | GTGTAGTTTTGAAGAAG | 2402 |
| | CTTCTTCAAAACTACAC | 2403 |
| Haemophilia B | TTGGAAGAGTTTGTTCAAGGGAACCTTGAGAGAGAATGTATG | 2404 |
| Glu26Gln | GAAGAAAAGTGTAGTTTTGAAGAAGCACGAGAAGTTTTTGAAA | |
| tGAA-CAA | ACACTGAAAGAACAGTGAGTATTTCCACATAATACC | |
| | GGTATTATGTGGAAATACTCACTGTTCTTTCAGTGTTTTCAAAA | 2405 |
| | ACTTCTCGTGCTTCTTCAAAACTACACTTTTCTTCCATACATTC | |
| | TCTCTCAAGGTTCCCTTGAACAAACTCTTCCAA | |
| | GTAGTTTTGAAGAAGCA | 2406 |
| | TGCTTCTTCAAAACTAC | 2407 |
| Haemophilia B | AAGAGTTTGTTCAAGGGAACCTTGAGAGAGAATGTATGGAAG | 2408 |
| Glu27Ala | AAAAGTGTAGTTTTGAAGAAGCACGAGAAGTTTTTGAAAACAC | |
| GAA-GCA | TGAAAGAACAGTGAGTATTTCCACATAATACCCTTC | |
| | GAAGGGTATTATGTGGAAATACTCACTGTTCTTTCAGTGTTTT | 2409 |
| | CAAAAACTTCTCGTGCTTCTTCAAAACTACACTTTTCTTCCATA | |
| | CATTCTCTCTCAAGGTTCCCTTGAACAAACTCTT | |
| | TTTTGAAGAAGCACGAG | 2410 |
| | CTCGTGCTTCTTCAAAA | 2411 |
| Haemophilia B | AGAGTTTGTTCAAGGGAACCTTGAGAGAGAATGTATGGAAGA | 2412 |
| Glu27Asp | AAAGTGTAGTTTTGAAGAAGCACGAGAAGTTTTTGAAAACACT | |
| GAAg-GAC | GAAAGAACAGTGAGTATTTCCACATAATACCCTTCA | |
| | TGAAGGGTATTATGTGGAAATACTCACTGTTCTTTCAGTGTTT | 2413 |
| | TCAAAAACTTCTCGTGCTTCTTCAAAACTACACTTTTCTTCCAT | |
| | ACATTCTCTCTCAAGGTTCCCTTGAACAAACTCT | |
| | TTTGAAGAAGCACGAGA | 2414 |
| | TCTCGTGCTTCTTCAAA | 2415 |
| Haemophilia B | GAAGAGTTTGTTCAAGGGAACCTTGAGAGAGAATGTATGGAA | 2416 |
| Glu27Lys | GAAAAGTGTAGTTTTGAAGAAGCACGAGAAGTTTTTGAAAACA | |
| aGAA-AAA | CTGAAAGAACAGTGAGTATTTCCACATAATACCCTT | |
| | AAGGGTATTATGTGGAAATACTCACTGTTCTTTCAGTGTTTTC | 2417 |
| | AAAAACTTCTCGTGCTTCTTCAAAACTACACTTTTCTTCCATAC | |
| | ATTCTCTCTCAAGGTTCCCTTGAACAAACTCTTC | |
| | GTTTTGAAGAAGCACGA | 2418 |
| | TCGTGCTTCTTCAAAAC | 2419 |
| Haemophilia B | AAGAGTTTGTTCAAGGGAACCTTGAGAGAGAATGTATGGAAG | 2420 |
| Glu27Val | AAAAGTGTAGTTTTGAAGAAGCACGAGAAGTTTTTGAAAACAC | |
| GAA-GTA | TGAAAGAACAGTGAGTATTTCCACATAATACCCTTC | |
| | GAAGGGTATTATGTGGAAATACTCACTGTTCTTTCAGTGTTTT | 2421 |
| | CAAAAACTTCTCGTGCTTCTTCAAAACTACACTTTTCTTCCATA | |
| | CATTCTCTCTCAAGGTTCCCTTGAACAAACTCTT | |
| | TTTTGAAGAAGCACGAG | 2422 |
| | CTCGTGCTTCTTCAAAA | 2423 |
| Haemophilia B | TTGTTCAAGGGAACCTTGAGAGAGAATGTATGGAAGAAAAGT | 2424 |
| Arg29Gln | GTAGTTTTGAAGAAGCACGAGAAGTTTTTGAAAACACTGAAAG | |
| CGA-CAA | AACAGTGAGTATTTCCACATAATACCCTTCAGATGC | |
| | GCATCTGAAGGGTATTATGTGGAAATACTCACTGTTCTTTCAG | 2425 |
| | TGTTTTCAAAAACTTCTCGTGCTTCTTCAAAACTACACTTTTCT | |
| | TCCATACATTCTCTCTCAAGGTTCCCTTGAACAA | |
| | AGAAGCACGAGAAGTTT | 2426 |
| | AAACTTCTCGTGCTTCT | 2427 |
| Haemophilia B | TTGTTCAAGGGAACCTTGAGAGAGAATGTATGGAAGAAAAGT | 2428 |
| Arg29Pro | GTAGTTTTGAAGAAGCACGAGAAGTTTTTGAAAACACTGAAAG | |
| CGA-CCA | AACAGTGAGTATTTCCACATAATACCCTTCAGATGC | |
| | GCATCTGAAGGGTATTATGTGGAAATACTCACTGTTCTTTCAG | 2429 |
| | TGTTTTCAAAAACTTCTCGTGCTTCTTCAAAACTACACTTTTCT | |
| | TCCATACATTCTCTCTCAAGGTTCCCTTGAACAA | |
| | AGAAGCACGAGAAGTTT | 2430 |
| | AAACTTCTCGTGCTTCT | 2431 |
| Haemophilia B | TTTGTTCAAGGGAACCTTGAGAGAGAATGTATGGAAGAATAAG | 2432 |
| Arg29Term | TGTAGTTTTGAAGAAGCACGAGAAGTTTTTGAAAACACTGAAA | |
| aCGA-TGA | GAACAGTGAGTATTTCCACATAATACCCTTCAGATG | |
| | CATCTGAAGGGTATTATGTGGAAATACTCACTGTTCTTTCAGT | 2433 |
| | GTTTTCAAAAACTTCTCGTGCTTCTTCAAAACTACACTTTTCTT | |
| | CCATACATTCTCTCTCAAGGTTCCCTTGAACAAA | |
| | AAGAAGCACGAGAAGTT | 2434 |
| | AACTTCTCGTGCTTCTT | 2435 |
| Haemophilia B | GTTCAAGGGAACCTTGAGAGAGAATGTATGGAAGAAAAGTGT | 2436 |
| Glu30Lys | AGTTTTGAAGAAGCACGAGAAGTTTTTGAAAACACTGAAAGAA | |
| aGAA-AAA | CAGTGAGTATTTCCACATAATACCCTTCAGATGCAG | |
| | CTGCATCTGAAGGGTATTATGTGGAAATACTCACTGTTCTTTC | 2437 |
| | AGTGTTTTCAAAAACTTCTCGTGCTTCTTCAAAACTACACTTTT | |
| | CTTCCATACATTCTCTCTCAAGGTTCCCTTGAAC | |
| | AAGCACGAGAAGTTTTT | 2438 |
| | AAAAACTTCTCGTGCTT | 2439 |
| Haemophilia B | GTTCAAGGGAACCTTGAGAGAGAATGTATGGAAGAAAAGTGT | 2440 |
| Glu30Term | AGTTTTGAAGAAGCACGAGAAGTTTTTGAAAACACTGAAAGAA | |
| aGAA-TAA | CAGTGAGTATTTCCACATAATACCCTTCAGATGCAG | |
| | CTGCATCTGAAGGGTATTATGTGGAAATACTCACTGTTCTTTC | 2441 |
| | AGTGTTTTCAAAAACTTCTCGTGCTTCTTCAAAACTACACTTTT | |
| | CTTCCATACATTCTCTCTCAAGGTTCCCTTGAAC | |
| | AAGCACGAGAAGTTTTT | 2442 |
| | AAAAACTTCTCGTGCTT | 2443 |
| Haemophilia B | CCTTGAGAGAGAATGTATGGAAGAAAAGTGTAGTTTTGAAGA | 2444 |
| Glu33Asp | AGCACGAGAAGTTTTTGAAAACACTGAAAGAACAGTGAGTAT | |
| GAAa-GAC | TTCCACATAATACCCTTCAGATGCAGAGCATAGAATA | |
| | TATTCTATGCTCTGCATCTGAAGGGTATTATGTGGAAATACTC | 2445 |
| | ACTGTTCTTTCAGTGTTTTCAAAAACTTCTCGTGCTTCTTCAAA | |
| | ACTACACTTTTCTTCCATACATTCTCTCTCAAGG | |
| | GTTTTTGAAAACACTGA | 2446 |
| | TCAGTGTTTTCAAAAAC | 2447 |
| Haemophilia B | AACCTTGAGAGAGAATGTATGGAAGAAAAGTGTAGTTTTGAA | 2448 |
| Glu33Term | GAAGCACGAGAAGTTTTTGAAAACACTGAAAGAACAGTGAGT | |
| tGAA-TAA | ATTTCCACATAATACCCTTCAGATGCAGAGCATAGAA | |
| | TTCTATGCTCTGCATCTGAAGGGTATTATGTGGAAATACTCAC | 2449 |
| | TGTTCTTTCAGTGTTTTCAAAAACTTCTCGTGCTTCTTCAAAAC | |
| | TACACTTTTCTTCCATACATTCTCTCTCAAGGTT | |
| | AAGTTTTTGAAAACACT | 2450 |
| | AGTGTTTTCAAAAACTT | 2451 |
| Haemophilia B | CAAAACACTTTAGATATTACCGTTAATTTGTCTTCTTTTATTCTT | 2452 |
| Trp42Term | TATAGACTGAATTTTGGAAGCAGTATGTTGGTAAGCAATTCAT | |
| TGG-TAG | TTTATCCTCTAGCTAATATATGAAACATATGAG | |
| | CTCATATGTTTCATATATTAGCTAGAGGATAAAATGAATTGCTT | 2453 |
| | ACCAACATACTGCTTCCAAAATTCAGTCTATAAAGAATAAAAG | |
| | AAGACAAATTAACGGTAATATCTAAAGTGTTTTG | |
| | TGAATTTTGGAAGCAGT | 2454 |
| | ACTGCTTCCAAAATTCA | 2455 |
| Haemophilia B | AAACACTTTAGATATTACCGTTAATTTGTCTTCTTTTATTCTTTA | 2456 |
| Lys43Glu | TAGACTGAATTTTGGAAGCAGTATGTTGGTAAGCAATTCATTT | |
| gAAG-GAG | TATCCTCTAGCTAATATATGAAACATATGAGAA | |
| | TTCTCATATGTTTCATATATTAGCTAGAGGATAAAATGAATTGC | 2457 |
| | TTACCAACATACTGCTTCCAAAATTCAGTCTATAAAGAATAAAA | |
| | GAAGACAAATTAACGGTAATATCTAAAGTGTTT | |
| | AATTTTGGAAGCAGTAT | 2458 |
| | ATACTGCTTCCAAAATT | 2459 |
| Haemophilia B | CACTTTAGATATTACCGTTAATTTGTCTTCTTTTATTCTTTATAG | 2460 |
| Gln44Term | ACTGAATTTTGGAAGCAGTATGTTGGTAAGCAATTCATTTTAT | |
| gCAG-TAG | CCTCTAGCTAATATATGAAACATATGAGAATTA | |
| | TAATTCTCATATGTTTCATATATTAGCTAGAGGATAAAATGAAT | 2461 |
| | TGCTTACCAACATACTGCTTCCAAAATTCAGTCTATAAAGAAT | |
| | AAAAGAAGACAAATTAACGGTAATATCTAAAGTG | |
| | TTTGGAAGCAGTATGTT | 2462 |
| | AACATACTGCTTCCAAA | 2463 |
| Haemophilia B | CCGGGCATTCTAAGCAGTTTACGTGCCAATTCAATTTCTTAAC | 2464 |
| Asp49Gly | CTATCTCAAAGATGGAGATCAGTGTGAGTCCAATCCATGTTTA | |
| GAT-GGT | AATGGCGGCAGTTGCAAGGATGACATTAATTCCTA | |
| | TAGGAATTAATGTCATCCTTGCAACTGCCGCCATTTAAACATG | 2465 |
| | GATTGGACTCACACTGATCTCCATCTTTGAGATAGGTTAAGAA | |
| | ATTGAATTGGCACGTAAACTGCTTAGAATGCCCGG | |
| | AGATGGAGATCAGTGTG | 2466 |
| | CACACTGATCTCCATCT | 2467 |
| Haemophilia B | GCATTCTAAGCAGTTTACGTGCCAATTCAATTTCTTAACCTAT | 2468 |
| Gln50His | CTCAAAGATGGAGATCAGTGTGAGTCCAATCCATGTTTAAATG | |
| CAGt-CAC | GCGGCAGTTGCAAGGATGACATTAATTCCTATGAA | |
| | TTCATAGGAATTAATGTCATCCTTGCAACTGCCGCCATTTAAA | 2469 |
| | CATGGATTGGACTCACACTGATCTCCATCTTTGAGATAGGTTA | |
| | AGAAATTGAATTGGCACGTAAACTGCTTAGAATGC | |
| | GGAGATCAGTGTGAGTC | 2470 |
| | GACTCACACTGATCTCC | 2471 |
| Haemophilia B | GGCATTCTAAGCAGTTTACGTGCCAATTCAATTTCTTAACCTA | 2472 |
| Gln50Pro | TCTCAAAGATGGAGATCAGTGTGAGTCCAATCCATGTTTAAAT | |
| CAG-CCG | GGCGGCAGTTGCAAGGATGACATTAATTCCTATGA | |
| | TCATAGGAATTAATGTCATCCTTGCAACTGCCGCCATTTAAAC | 2473 |
| | ATGGATTGGACTCACACTGATCTCCATCTTTGAGATAGGTTAA | |
| | GAAATTGAATTGGCACGTAAACTGCTTAGAATGCC | |
| | TGGAGATCAGTGTGAGT | 2474 |
| | ACTCACACTGATCTCCA | 2475 |
| Haemophilia B | GGGCATTCTAAGCAGTTTACGTGCCAATTCAATTTCTTAACCT | 2476 |
| Gln50Term | ATCTCAAAGATGGAGATCAGTGTGAGTCCAATCCATGTTTAAA | |
| tCAG-TAG | TGGCGGCAGTTGCAAGGATGACATTAATTCCTATG | |
| tCAG-TAG | CATAGGAATTAATGTCATCCTTGCAACTGCCGCCATTTAAACA | 2477 |
| | TGGATTGGACTCACACTGATCTCCATCTTTGAGATAGGTTAAG | |
| | AAATTGAATTGGCACGTAAACTGCTTAGAATGCCC | |
| | ATGGAGATCAGTGTGAG | 2478 |
| | CTCACACTGATCTCCAT | 2479 |
| Haemophilia B | CATTCTAAGCAGTTTACGTGCCAATTCAATTTCTTAACCTATCT | 2480 |
| Cys51Arg | CAAAGATGGAGATCAGTGTGAGTCCAATCCATGTTTAAATGG | |
| gTGT-CGT | CGGCAGTTGCAAGGATGACATTAATTCCTATGAAT | |
| | ATTCATAGGAATTAATGTCATCCTTGCAACTGCCGCCATTTAA | 2481 |
| | ACATGGATTGGACTCACACTGATCTCCATCTTTGAGATAGGTT | |
| | AAGAAATTGAATTGGCACGTAAACTGCTTAGAATG | |
| | GAGATCAGTGTGAGTCC | 2482 |
| | GGACTCACACTGATCTC | 2483 |
| Haemophilia B | CATTCTAAGCAGTTTACGTGCCAATTCAATTTCTTAACCTATCT | 2484 |
| Cys51Ser | CAAAGATGGAGATCAGTGTGAGTCCAATCCATGTTTAAATGG | |
| gTGT-AGT | CGGCAGTTGCAAGGATGACATTAATTCCTATGAAT | |
| | ATTCATAGGAATTAATGTCATCCTTGCAACTGCCGCCATTTAA | 2485 |
| | ACATGGATTGGACTCACACTGATCTCCATCTTTGAGATAGGTT | |
| | AAGAAATTGAATTGGCACGTAAACTGCTTAGAATG | |
| | GAGATCAGTGTGAGTCC | 2486 |
| | GGACTCACACTGATCTC | 2487 |
| Haemophilia B | TTCTAAGCAGTTTACGTGCCAATTCAATTTCTTAACCTATCTCA | 2488 |
| Cys51Trp | AAGATGGAGATCAGTGTGAGTCCAATCCATGTTTAAATGGCG | |
| TGTg-TGG | GCAGTTGCAAGGATGACATTAATTCCTATGAATGT | |
| | ACATTCATAGGAATTAATGTCATCCTTGCAACTGCCGCCATTT | 2489 |
| | AAACATGGATTGGACTCACACTGATCTCCATCTTTGAGATAGG | |
| | TTAAGAAATTGAATTGGCACGTAAACTGCTTAGAA | |
| | GATCAGTGTGAGTCCAA | 2490 |
| | TTGGACTCACACTGATC | 2491 |
| Haemophilia B | TCTAAGCAGTTTACGTGCCAATTCAATTTCTTAACCTATCTCAA | 2492 |
| Glu52Term | AGATGGAGATCAGTGTGAGTCCAATCCATGTTTAAATGGCGG | |
| tGAG-TAG | CAGTTGCAAGGATGACATTAATTCCTATGAATGTT | |
| | AACATTCATAGGAATTAATGTCATCCTTGCAACTGCCGCCATT | 2493 |
| | TAAACATGGATTGGACTCACACTGATCTCCATCTTTGAGATAG | |
| | GTTAAGAAATTGAATTGGCACGTAAACTGCTTAGA | |
| | ATCAGTGTGAGTCCAAT | 2494 |
| | ATTGGACTCACACTGAT | 2495 |
| Haemophilia B | TTTACGTGCCAATTCAATTTCTTAACCTATCTCAAAGATGGAG | 2496 |
| Pro55Ala | ATCAGTGTGAGTCCAATCCATGTTTAAATGGCGGCAGTTGCA | |
| tCCA-GCA | AGGATGACATTAATTCCTATGAATGTTGGTGTCCCT | |
| | AGGGACACCAACATTCATAGGAATTAATGTCATCCTTGCAACT | 2497 |
| | GCCGCCATTTAAACATGGATTGGACTCACACTGATCTCCATCT | |
| | TTGAGATAGGTTAAGAAATTGAATTGGCACGTAAA | |
| | AGTCCAATCCATGTTTA | 2498 |
| | TAAACATGGATTGGACT | 2499 |
| Haemophilia B | TTACGTGCCAATTCAATTTCTTAACCTATCTCAAAGATGGAGA | 2500 |
| Pro55Arg | TCAGTGTGAGTCCAATCCATGTTTAAATGGCGGCAGTTGCAA | |
| CCA-CGA | GGATGACATTAATTCCTATGAATGTTGGTGTCCCTT | |
| | AAGGGACACCAACATTCATAGGAATTAATGTCATCCTTGCAAC | 2501 |
| | TGCCGCCATTTAAACATGGATTGGACTCACACTGATCTCCATC | |
| | TTTGAGATAGGTTAAGAAATTGAATTGGCACGTAA | |
| | GTCCAATCCATGTTTAA | 2502 |
| | TTAAACATGGATTGGAC | 2503 |
| Haemophilia B | TTACGTGCCAATTCAATTTCTTAACCTATCTCAAAGATGGAGA | 2504 |
| Pro55Gln | TCAGTGTGAGTCCAATCCATGTTTAAATGGCGGCAGTTGCAA | |
| CCA-CAA | GGATGACATTAATTCCTATGAATGTTGGTGTCCCTT | |
| | AAGGGACACCAACATTCATAGGAATTAATGTCATCCTTGCAAC | 2505 |
| | TGCCGCCATTTAAACATGGATTGGACTCACACTGATCTCCATC | |
| | TTTGAGATAGGTTAAGAAATTGAATTGGCACGTAA | |
| | GTCCAATCCATGTTTAA | 2506 |
| | TTAAACATGGATTGGAC | 2507 |
| Haemophilia B | TTACGTGCCAATTCAATTTCTTAACCTATCTCAAAGATGGAGA | 2508 |
| Pro55Leu | TCAGTGTGAGTCCAATCCATGTTTAAATGGCGGCAGTTGCAA | |
| CCA-CTA | GGATGACATTAATTCCTATGAATGTTGGTGTCCCTT | |
| | AAGGGACACCAACATTCATAGGAATTAATGTCATCCTTGCAAC | 2509 |
| | TGCCGCCATTTAAACATGGATTGGACTCACACTGATCTCCATC | |
| | TTTGAGATAGGTTAAGAAATTGAATTGGCACGTAA | |
| | GTCCAATCCATGTTTAA | 2510 |
| | TTAAACATGGATTGGAC | 2511 |
| Haemophilia B | TTTACGTGCCAATTCAATTTCTTAACCTATCTCAAAGATGGAG | 2512 |
| Pro55Ser | ATCAGTGTGAGTCCAATCCATGTTTAAATGGCGGCAGTTGCA | |
| tCCA-TCA | AGGATGACATTAATTCCTATGAATGTTGGTGTCCCT | |
| | AGGGACACCAACATTCATAGGAATTAATGTCATCCTTGCAACT | 2513 |
| | GCCGCCATTTAAACATGGATTGGACTCACACTGATCTCCATCT | |
| | TTGAGATAGGTTAAGAAATTGAATTGGCACGTAAA | |
| | AGTCCAATCCATGTTTA | 2514 |
| | TAAACATGGATTGGACT | 2515 |
| Haemophilia B | ACGTGCCAATTCAATTTCTTAACCTATCTCAAAGATGGAGATC | 2516 |
| Cys56Arg | AGTGTGAGTCCAATCCATGTTTAAATGGCGGCAGTTGCAAGG | |
| aTGT-CGT | ATGACATTAATTCCTATGAATGTTGGTGTCCCTTTG | |
| | CAAAGGGACACCAACATTCATAGGAATTAATGTCATCCTTGCA 2517 | |
| | ACTGCCGCCATTTAAACATGGATTGGACTCACACTGATCTCC | |
| | ATCTTTGAGATAGGTTAAGAAATTGAATTGGCACGT | |
| | CCAATCCATGTTTAAAT | 2518 |
| | ATTTAAACATGGATTGG | 2519 |
| Haemophilia B | ACGTGCCAATTCAATTTCTTAACCTATCTCAAAGATGGAGATC | 2520 |
| Cys56Ser | AGTGTGAGTCCAATCCATGTTTAAATGGCGGCAGTTGCAAGG | |
| aTGT-AGT | ATGACATTAATTCCTATGAATGTTGGTGTCCCTTTG | |
| | CAAAGGGACACCAACATTCATAGGAATTAATGTCATCCTTGCA | 2521 |
| | ACTGCCGCCATTTAAACATGGATTGGACTCACACTGATCTCC | |
| | ATCTTTGAGATAGGTTAAGAAATTGAATTGGCACGT | |
| | CCAATCCATGTTTAAAT | 2522 |
| | ATTTAAACATGGATTGG | 2523 |
| Haemophilia B | CGTGCCAATTCAATTTCTTAACCTATCTCAAAGATGGAGATCA | 2524 |
| Cys56Ser | GTGTGAGTCCAATCCATGTTTAAATGGCGGCAGTTGCAAGGA | |
| TGT-TCT | TGACATTAATTCCTATGAATGTTGGTGTCCCTTTGG | |
| | CCAAAGGGACACCAACATTCATAGGAATTAATGTCATCCTTGC | 2525 |
| | AACTGCCGCCATTTAAACATGGATTGGACTCACACTGATCTCC | |
| | ATCTTTGAGATAGGTTAAGAAATTGAATTGGCACG | |
| | CAATCCATGTTTAAATG | 2526 |
| | CATTTAAACATGGATTG | 2527 |
| Haemophilia B | CGTGCCAATTCAATTTCTTAACCTATCTCAAAGATGGAGATCA | 2528 |
| Cys56Tyr | GTGTGAGTCCAATCCATGTTTAAATGGCGGCAGTTGCAAGGA | |
| TGT-TAT | TGACATTAATTCCTATGAATGTTGGTGTCCCTTTGG | |
| | CCAAAGGGACACCAACATTCATAGGAATTAATGTCATCCTTGC | 2529 |
| | AACTGCCGCCATTTAAACATGGATTGGACTCACACTGATCTCC | |
| | ATCTTTGAGATAGGTTAAGAAATTGAATTGGCACG | |
| | CAATCCATGTTTAAATG | 2530 |
| | CATTTAAACATGGATTG | 2531 |
| Haemophilia B | ATTCAATTTCTTAACCTATCTCAAAGATGGAGATCAGTGTGAG | 2532 |
| Asn58Lys | TCCAATCCATGTTTAAATGGCGGCAGTTGCAAGGATGACATTA | |
| AATg-AAG | ATTCCTATGAATGTTGGTGTCCCTTTGGATTTGAA | |
| | TTCAAATCCAAAGGGACACCAACATTCATAGGAATTAATGTCA | 2533 |
| | TCCTTGCAACTGCCGCCATTTAAACATGGATTGGACTCACACT | |
| | GATCTCCATCTTTGAGATAGGTTAAGAAATTGAAT | |
| | TGTTTAAATGGCGGCAG | 2534 |
| | CTGCCGCCATTTAAACA | 2535 |
| Haemophilia B | TCAATTTCTTAACCTATCTCAAAGATGGAGATCAGTGTGAGTC | 2536 |
| Gly59Asp | CAATCCATGTTTAAATGGCGGCAGTTGCAAGGATGACATTAAT | |
| GGC-GAC | TCCTATGAATGTTGGTGTCCCTTTGGATTTGAAGG | |
| | CCTTCAAATCCAAAGGGACACCAACATTCATAGGAATTAATGT | 2537 |
| | CATCCTTGCAACTGCCGCCATTTAAACATGGATTGGACTCACA | |
| | CTGATCTCCATCTTTGAGATAGGTTAAGAAATTGA | |
| | TTTAAATGGCGGCAGTT | 2538 |
| | AACTGCCGCCATTTAAA | 2539 |
| Haemophilia B | TCAATTTCTTAACCTATCTCAAAGATGGAGATCAGTGTGAGTC | 2540 |
| Gly59Val | CAATCCATGTTTAAATGGCGGCAGTTGCAAGGATGACATTAAT | |
| GGC-GTC | TCCTATGAATGTTGGTGTCCCTTTGGATTTGAAGG | |
| | CCTTCAAATCCAAAGGGACACCAACATTCATAGGAATTAATGT | 2541 |
| | CATCCTTGCAACTGCCGCCATTTAAACATGGATTGGACTCACA | |
| | CTGATCTCCATCTTTGAGATAGGTTAAGAAATTGA | |
| | TTTAAATGGCGGCAGTT | 2542 |
| | AACTGCCGCCATTTAAA | 2543 |
| Haemophilia B | TTCAATTTCTTAACCTATCTCAAAGATGGAGATCAGTGTGAGT | 2544 |
| Gly59Ser | CCAATCCATGTTTAAATGGCGGCAGTTGCAAGGATGACATTA | |
| tGGC-AGC | ATTCCTATGAATGTTGGTGTCCCTTTGGATTTGAAG | |
| | CTTCAAATCCAAAGGGACACCAACATTCATAGGAATTAATGTC | 2545 |
| | ATCCTTGCAACTGCCGCCATTTAAACATGGATTGGACTCACAC | |
| | TGATCTCCATCTTTGAGATAGGTTAAGAAATTGAA | |
| | GTTTAAATGGCGGCAGT | 2546 |
| | ACTGCCGCCATTTAAAC | 2547 |
| Haemophilia B | AATTTCTTAACCTATCTCAAAGATGGAGATCAGTGTGAGTCCA | 2548 |
| Gly60Ser | ATCCATGTTTAAATGGCGGCAGTTGCAAGGATGACATTAATTC | |
| cGGC-AGC | CTATGAATGTTGGTGTCCCTTTGGATTTGAAGGAA | |
| | TTCCTTCAAATCCAAAGGGACACCAACATTCATAGGAATTAAT | 2549 |
| | GTCATCCTTGCAACTGCCGCCATTTAAACATGGATTGGACTCA | |
| | CACTGATCTCCATCTTTGAGATAGGTTAAGAAATT | |
| | TAAATGGCGGCAGTTGC | 2550 |
| | GCAACTGCCGCCATTTA | 2551 |
| Haemophilia B | AATTTCTTAACCTATCTCAAAGATGGAGATCAGTGTGAGTCCA | 2552 |
| Gly60Cys | ATCCATGTTTAAATGGCGGCAGTTGCAAGGATGACATTAATTC | |
| cGGC-TGC | CTATGAATGTTGGTGTCCCTTTGGATTTGAAGGAA | |
| | TTCCTTCAAATCCAAAGGGACACCAACATTCATAGGAATTAAT | 2553 |
| | GTCATCCTTGCAACTGCCGCCATTTAAACATGGATTGGACTCA | |
| | CACTGATCTCCATCTTTGAGATAGGTTAAGAAATT | |
| | TAAATGGCGGCAGTTGC | 2554 |
| | GCAACTGCCGCCATTTA | 2555 |
| Haemophilia B | ATTTCTTAACCTATCTCAAAGATGGAGATCAGTGTGAGTCCAA | 2556 |
| Gly60Asp | TCCATGTTTAAATGGCGGCAGTTGCAAGGATGACATTAATTCC | |
| GGC-GAC | TATGAATGTTGGTGTCCCTTTGGATTTGAAGGAAA | |
| | TTTCCTTCAAATCCAAAGGGACACCAACATTCATAGGAATTAA | 2557 |
| | TGTCATCCTTGCAACTGCCGCCATTTAAACATGGATTGGACTC | |
| | ACACTGATCTCCATCTTTGAGATAGGTTAAGAAAT | |
| | AAATGGCGGCAGTTGCA | 2558 |
| | TGCAACTGCCGCCATTT | 2559 |
| Haemophilia B | AATTTCTTAACCTATCTCAAAGATGGAGATCAGTGTGAGTCCA | 2560 |
| Gly60Arg | ATCCATGTTTAAATGGCGGCAGTTGCAAGGATGACATTAATTC | |
| cGGC-CGC | CTATGAATGTTGGTGTCCCTTTGGATTTGAAGGAA | |
| | TTCCTTCAAATCCAAAGGGACACCAACATTCATAGGAATTAAT | 2561 |
| | GTCATCCTTGCAACTGCCGCCATTTAAACATGGATTGGACTCA | |
| | CACTGATCTCCATCTTTGAGATAGGTTAAGAAATT | |
| | TAAATGGCGGCAGTTGC | 2562 |
| | GCAACTGCCGCCATTTA | 2563 |
| Haemophilia B | TAACCTATCTCAAAGATGGAGATCAGTGTGAGTCCAATCCATG | 2564 |
| Cys62Tyr | TTTAAATGGCGGCAGTTGCAAGGATGACATTAATTCCTATGAA | |
| TGC-TAC | TGTTGGTGTCCCTTTGGATTTGAAGGAAAGAACTG | |
| | CAGTTCTTTCCTTCAAATCCAAAGGGACACCAACATTCATAGG | 2565 |
| | AATTAATGTCATCCTTGCAACTGCCGCCATTTAAACATGGATT | |
| | GGACTCACACTGATCTCCATCTTTGAGATAGGTTA | |
| | CGGCAGTTGCAAGGATG | 2566 |
| | CATCCTTGCAACTGCCG | 2567 |
| Haemophilia B | TAACCTATCTCAAAGATGGAGATCAGTGTGAGTCCAATCCATG | 2568 |
| Cys62Ser | TTTAAATGGCGGCAGTTGCAAGGATGACATTAATTCCTATGAA | |
| TGC-TCC | TGTTGGTGTCCCTTTGGATTTGAAGGAAAGAACTG | |
| | CAGTTCTTTCCTTCAAATCCAAAGGGACACCAACATTCATAGG | 2569 |
| | AATTAATGTCATCCTTGCAACTGCCGCCATTTAAACATGGATT | |
| | GGACTCACACTGATCTCCATCTTTGAGATAGGTTA | |
| | CGGCAGTTGCAAGGATG | 2570 |
| | CATCCTTGCAACTGCCG | 2571 |
| Haemophilia B | AACCTATCTCAAAGATGGAGATCAGTGTGAGTCCAATCCATGT | 2572 |
| Cys62Term | TTAAATGGCGGCAGTTGCAAGGATGACATTAATTCCTATGAAT | |
| TGCa-TGA | GTTGGTGTCCCTTTGGATTTGAAGGAAAGAACTGT | |
| | ACAGTTCTTTCCTTCAAATCCAAAGGGACACCAACATTCATAG | 2573 |
| | GAATTAATGTCATCCTTGCAACTGCCGCCATTTAAACATGGAT | |
| | TGGACTCACACTGATCTCCATCTTTGAGATAGGTT | |
| | GGCAGTTGCAAGGATGA | 2574 |
| | TCATCCTTGCAACTGCC | 2575 |
| Haemophilia B | TCTCAAAGATGGAGATCAGTGTGAGTCCAATCCATGTTTAAAT | 2576 |
| Asp64Glu | GGCGGCAGTTGCAAGGATGACATTAATTCCTATGAATGTTGG | |
| GATg-GAG | TGTCCCTTTGGATTTGAAGGAAAGAACTGTGAATTA | |
| | TAATTCACAGTTCTTTCCTTCAAATCCAAAGGGACACCAACAT | 2577 |
| | TCATAGGAATTAATGTCATCCTTGCAACTGCCGCCATTTAAAC | |
| | ATGGATTGGACTCACACTGATCTCCATCTTTGAGA | |
| | TGCAAGGATGACATTAA | 2578 |
| | TTAATGTCATCCTTGCA | 2579 |
| Haemophilia B | ATCTCAAAGATGGAGATCAGTGTGAGTCCAATCCATGTTTAAA | 2580 |
| Asp64Gly | TGGCGGCAGTTGCAAGGATGACATTAATTCCTATGAATGTTG | |
| GAT-GGT | GTGTCCCTTTGGATTTGAAGGAAAGAACTGTGAATT | |
| | AATTCACAGTTCTTTCCTTCAAATCCAAAGGGACACCAACATT | 2581 |
| | CATAGGAATTAATGTCATCCTTGCAACTGCCGCCATTTAAACA | |
| | TGGATTGGACTCACACTGATCTCCATCTTTGAGAT | |
| | TTGCAAGGATGACATTA | 2582 |
| | TAATGTCATCCTTGCAA | 2583 |
| Haemophilia B | TATCTCAAAGATGGAGATCAGTGTGAGTCCAATCCATGTTTAA | 2584 |
| Asp64Asn | ATGGCGGCAGTTGCAAGGATGACATTAATTCCTATGAATGTT | |
| gGAT-AAT | GGTGTCCCTTTGGATTTGAAGGAAAGAACTGTGAAT | |
| | ATTCACAGTTCTTTCCTTCAAATCCAAAGGGACACCAACATTC | 2585 |
| | ATAGGAATTAATGTCATCCTTGCAACTGCCGCCATTTAAACAT | |
| | GGATTGGACTCACACTGATCTCCATCTTTGAGATA | |
| | GTTGCAAGGATGACATT | 2586 |
| | AATGTCATCCTTGCAAC | 2587 |
| Haemophilia B | AAGATGGAGATCAGTGTGAGTCCAATCCATGTTTAAATGGCG | 2588 |
| Ile66Ser | GCAGTTGCAAGGATGACATTAATTCCTATGAATGTTGGTGTCC | |
| ATT-AGT | CTTTGGATTTGAAGGAAAGAACTGTGAATTAGGTAA | |
| | TTACCTAATTCACAGTTCTTTCCTTCAAATCCAAAGGGACACC | 2589 |
| | AACATTCATAGGAATTAATGTCATCCTTGCAACTGCCGCCATT | |
| | TAAACATGGATTGGACTCACACTGATCTCCATCTT | |
| | GGATGACATTAATTCCT | 2590 |
| | AGGAATTAATGTCATCC | 2591 |
| Haemophilia B | AAGATGGAGATCAGTGTGAGTCCAATCCATGTTTAAATGGCG | 2592 |
| Ile66Thr | GCAGTTGCAAGGATGACATTAATTCCTATGAATGTTGGTGTCC | |
| ATT-ACT | CTTTGGATTTGAAGGAAAGAACTGTGAATTAGGTAA | |
| | TTACCTAATTCACAGTTCTTTCCTTCAAATCCAAAGGGACACC | 2593 |
| | AACATTCATAGGAATTAATGTCATCCTTGCAACTGCCGCCATT | |
| | TAAACATGGATTGGACTCACACTGATCTCCATCTT | |
| | GGATGACATTAATTCCT | 2594 |
| | AGGAATTAATGTCATCC | 2595 |
| Haemophilia B | TGGAGATCAGTGTGAGTCCAATCCATGTTTAAATGGCGGCAG | 2596 |
| Asn67Lys | TTGCAAGGATGACATTAATTCCTATGAATGTTGGTGTCCCTTT | |
| AATt-AAA | GGATTTGAAGGAAAGAACTGTGAATTAGGTAAGTAA | |
| | TTACTTACCTAATTCACAGTTCTTTCCTTCAAATCCAAAGGGA | 2597 |
| | CACCAACATTCATAGGAATTAATGTCATCCTTGCAACTGCCGC | |
| | CATTTAAACATGGATTGGACTCACACTGATCTCCA | |
| | GACATTAATTCCTATGA | 2598 |
| | TCATAGGAATTAATGTC | 2599 |
| Haemophilia B | ATCAGTGTGAGTCCAATCCATGTTTAAATGGCGGCAGTTGCA | 2600 |
| Tyr69Cys | AGGATGACATTAATTCCTATGAATGTTGGTGTCCCTTTGGATT | |
| TAT-TGT | TGAAGGAAAGAACTGTGAATTAGGTAAGTAACTATT | |
| | AATAGTTACTTACCTAATTCACAGTTCTTTCCTTCAAATCCAAA | 2601 |
| | GGGACACCAACATTCATAGGAATTAATGTCATCCTTGCAACTG | |
| | CCGCCATTTAAACATGGATTGGACTCACACTGAT | |
| | TAATTCCTATGAATGTT | 2602 |
| | AACATTCATAGGAATTA | 2603 |
| Haemophilia B | TGAGTCCAATCCATGTTTAAATGGCGGCAGTTGCAAGGATGA | 2604 |
| Cys71Term | CATTAATTCCTATGAATGTTGGTGTCCCTTTGGATTTGAAGGA | |
| TGTt-TGA | AAGAACTGTGAATTAGGTAAGTAACTATTTTTTGAA | |
| | TTCAAAAAATAGTTACTTACCTAATTCACAGTTCTTTCCTTCAA | 2605 |
| | ATCCAAAGGGACACCAACATTCATAGGAATTAATGTCATCCTT | |
| | GCAACTGCCGCCATTTAAACATGGATTGGACTCA | |
| | TATGAATGTTGGTGTCC | 2606 |
| | GGACACCAACATTCATA | 2607 |
| Haemophilia B | GTGAGTCCAATCCATGTTTAAATGGCGGCAGTTGCAAGGATG | 2608 |
| Cys71Ser | ACATTAATTCCTATGAATGTTGGTGTCCCTTTGGATTTGAAGG | |
| TGT-TCT | AAAGAACTGTGAATTAGGTAAGTAACTATTTTTTGA | |
| | TCAAAAAATAGTTACTTACCTAATTCACAGTTCTTTCCTTCAAA | 2609 |
| | TCCAAAGGGACACCAACATTCATAGGAATTAATGTCATCCTTG | |
| | CAACTGCCGCCATTTAAACATGGATTGGACTCAC | |
| | CTATGAATGTTGGTGTC | 2610 |
| | GACACCAACATTCATAG | 2611 |
| Haemophilia B | GTGAGTCCAATCCATGTTTAAATGGCGGCAGTTGCAAGGATG | 2612 |
| Cys71Tyr | ACATTAATTCCTATGAATGTTGGTGTCCCTTTGGATTTGAAGG | |
| TGT-TAT | AAAGAACTGTGAATTAGGTAAGTAACTATTTTTTGA | |
| | TCAAAAAATAGTTACTTACCTAATTCACAGTTCTTTCCTTCAAA | 2613 |
| | TCCAAAGGGACACCAACATTCATAGGAATTAATGTCATCCTTG | |
| | CAACTGCCGCCATTTAAACATGGATTGGACTCAC | |
| | CTATGAATGTTGGTGTC | 2614 |
| | GACACCAACATTCATAG | 2615 |
| Haemophilia B | TGTGAGTCCAATCCATGTTTAAATGGCGGCAGTTGCAAGGAT | 2616 |
| Cys11Ser | GACATTAATTCCTATGAATGTTGGTGTCCCTTTGGATTTGAAG | |
| aTGT-AGT | GAAAGAACTGTGAATTAGGTAAGTAACTATTTTTTG | |
| | CAAAAAATAGTTACTTACCTAATTCACAGTTCTTTCCTTCAAAT | 2617 |
| | CCAAAGGGACACCAACATTCATAGGAATTAATGTCATCCTTGC | |
| | AACTGCCGCCATTTAAACATGGATTGGACTCACA | |
| | CCTATGAATGTTGGTGT | 2618 |
| | ACACCAACATTCATAGG | 2619 |
| Haemophilia B | GAGTCCAATCCATGTTTAAATGGCGGCAGTTGCAAGGATGAC | 2620 |
| Trp72Arg | ATTAATTCCTATGAATGTTGGTGTCCCTTTGGATTTGAAGGAA | |
| tTGG-AGG | AGAACTGTGAATTAGGTAAGTAACTATTTTTTGAAT | |
| | ATTCAAAAAATAGTTACTTACCTAATTCACAGTTCTTTCCTTCA | 2621 |
| | AATCCAAAGGGACACCAACATTCATAGGAATTAATGTCATCCT | |
| | TGCAACTGCCGCCATTTAAACATGGATTGGACTC | |
| | ATGAATGTTGGTGTCCC | 2622 |
| | GGGACACCAACATTCAT | 2623 |
| Haemophilia B | GTCCAATCCATGTTTAAATGGCGGCAGTTGCAAGGATGACAT | 2624 |
| Trp72Term | TAATTCCTATGAATGTTGGTGTCCCTTTGGATTTGAAGGAAAG | |
| TGGt-TGA | AACTGTGAATTAGGTAAGTAACTATTTTTTGAATAC | |
| | GTATTCAAAAAATAGTTACTTACCTAATTCACAGTTCTTTCCTT | 2625 |
| | CAAATCCAAAGGGACACCAACATTCATAGGAATTAATGTCATC | |
| | CTTGCAACTGCCGCCATTTAAACATGGATTGGAC | |
| | GAATGTTGGTGTCCCTT | 2626 |
| | AAGGGACACCAACATTC | 2627 |
| Haemophilia B | CCAATCCATGTTTAAATGGCGGCAGTTGCAAGGATGACATTA | 2628 |
| Cys73Tyr | ATTCCTATGAATGTTGGTGTCCCTTTGGATTTGAAGGAAAGAA | |
| TGT-TAT | CTGTGAATTAGGTAAGTAACTATTTTTTGAATACTC | |
| | GAGTATTCAAAAAATAGTTACTTACCTAATTCACAGTTCTTTCC | 2629 |
| | TTCAAATCCAAAGGGACACCAACATTCATAGGAATTAATGTCA | |
| | TCCTTGCAACTGCCGCCATTTAAACATGGATTGG | |
| | ATGTTGGTGTCCCTTTG | 2630 |
| | CAAAGGGACACCAACAT | 2631 |
| Haemophilia B | TCCAATCCATGTTTAAATGGCGGCAGTTGCAAGGATGACATTA | 2632 |
| Cys73Arg | ATTCCTATGAATGTTGGTGTCCCTTTGGATTTGAAGGAAAGAA | |
| gTGT-CGT | CTGTGAATTAGGTAAGTAACTATTTTTTGAATACT | |
| | AGTATTCAAAAAATAGTTACTTACCTAATTCACAGTTCTTTCCT | 2633 |
| | TCAAATCCAAAGGGACACCAACATTCATAGGAATTAATGTCAT | |
| | CCTTGCAACTGCCGCCATTTAAACATGGATTGGA | |
| | AATGTTGGTGTCCCTTT | 2634 |
| | AAAGGGACACCAACATT | 2635 |
| Haemophilia B | CCAATCCATGTTTAAATGGCGGCAGTTGCAAGGATGACATTA | 2636 |
| Cys73Phe | ATTCCTATGAATGTTGGTGTCCCTTTGGATTTGAAGGAAAGAA | |
| TGT-TTT | CTGTGAATTAGGTAAGTAACTATTTTTTGAATACTC | |
| | GAGTATTCAAAAAATAGTTACTTACCTAATTCACAGTTCTTTCC | 2637 |
| | TTCAAATCCAAAGGGACACCAACATTCATAGGAATTAATGTCA | |
| | TCCTTGCAACTGCCGCCATTTAAACATGGATTGG | |
| | ATGTTGGTGTCCCTTTG | 2638 |
| | CAAAGGGACACCAACAT | 2639 |
| Haemophilia B | CAATCCATGTTTAAATGGCGGCAGTTGCAAGGATGACATTAAT | 2640 |
| Cys73Term | TCCTATGAATGTTGGTGTCCCTTTGGATTTGAAGGAAAGAACT | |
| TGTc-TGA | GTGAATTAGGTAAGTAACTATTTTTTGAATACTCA | |
| | TGAGTATTCAAAAAATAGTTACTTACCTAATTCACAGTTCTTTC | 2641 |
| | CTTCAAATCCAAAGGGACACCAACATTCATAGGAATTAATGTC | |
| | ATCCTTGCAACTGCCGCCATTTAAACATGGATTG | |
| | TGTTGGTGTCCCTTTGG | 2642 |
| | CCAAAGGGACACCAACA | 2643 |
| Haemophilia B | GTTTAAATGGCGGCAGTTGCAAGGATGACATTAATTCCTATGA | 2644 |
| Gly76Val | ATGTTGGTGTCCCTTTGGATTTGAAGGAAAGAACTGTGAATTA | |
| GGA-GTA | GGTAAGTAACTATTTTTTGAATACTCATGGTTCAA | |
| | TTGAACCATGAGTATTCAAAAAATAGTTACTTACCTAATTCACA | 2645 |
| | GTTCTTTCCTTCAAATCCAAAGGGACACCAACATTCATAGGAA | |
| | TTAATGTCATCCTTGCAACTGCCGCCATTTAAAC | |
| | TCCCTTTGGATTTGAAG | 2646 |
| | CTTCAAATCCAAAGGGA | 2647 |
| Haemophilia B | TGTTTAAATGGCGGCAGTTGCAAGGATGACATTAATTCCTATG | 2648 |
| Gly76Arg | AATGTTGGTGTCCCTTTGGATTTGAAGGAAAGAACTGTGAATT | |
| tGGA-AGA | AGGTAAGTAACTATTTTTTGAATACTCATGGTTCA | |
| | TGAACCATGAGTATTCAAAAAATAGTTACTTACCTAATTCACA | 2649 |
| | GTTCTTTCCTTCAAATCCAAAGGGACACCAACATTCATAGGAA | |
| | TTAATGTCATCCTTGCAACTGCCGCCATTTAAACA | |
| | GTCCCTTTGGATTTGAA | 2650 |
| | TTCAAATCCAAAGGGAC | 2651 |
| Haemophilia B | TAAATGGCGGCAGTTGCAAGGATGACATTAATTCCTATGAATG | 2652 |
| Phe77Cys | TTGGTGTCCCTTTGGATTTGAAGGAAAGAACTGTGAATTAGGT | |
| TTT-TGT | AAGTAACTATTTTTTGAATACTCATGGTTCAAAGT | |
| | ACTTTGAACCATGAGTATTCAAAAAATAGTTACTTACCTAATTC | 2653 |
| | ACAGTTCTTTCCTTCAAATCCAAAGGGACACCAACATTCATAG | |
| | GAATTAATGTCATCCTTGCAACTGCCGCCATTTA | |
| | CTTTGGATTTGAAGGAA | 2654 |
| | TTCCTTCAAATCCAAAG | 2655 |
| Haemophilia B | TAAATGGCGGCAGTTGCAAGGATGACATTAATTCCTATGAATG | 2656 |
| Phe77Ser | TTGGTGTCCCTTTGGATTTGAAGGAAAGAACTGTGAATTAGGT | |
| TTT-TCT | AAGTAACTATTTTTTGAATACTCATGGTTCAAAGT | |
| | ACTTTGAACCATGAGTATTCAAAAAATAGTTACTTACCTAATTC | 2657 |
| | ACAGTTCTTTCCTTCAAATCCAAAGGGACACCAACATTCATAG | |
| | GAATTAATGTCATCCTTGCAACTGCCGCCATTTA | |
| | CTTTGGATTTGAAGGAA | 2658 |
| | TTCCTTCAAATCCAAAG | 2659 |
| Haemophilia B | TAAATGGCGGCAGTTGCAAGGATGACATTAATTCCTATGAATG | 2660 |
| Phe77Tyr | TTGGTGTCCCTTTGGATTTGAAGGAAAGAACTGTGAATTAGGT | |
| TTT-TAT | AAGTAACTATTTTTTGAATACTCATGGTTCAAAGT | |
| | ACTTTGAACCATGAGTATTCAAAAAATAGTTACTTACCTAATTC | 2661 |
| | ACAGTTCTTTCCTTCAAATCCAAAGGGACACCAACATTCATAG | |
| | GAATTAATGTCATCCTTGCAACTGCCGCCATTTA | |
| | CTTTGGATTTGAAGGAA | 2662 |
| | TTCCTTCAAATCCAAAG | 2663 |
| Haemophilia B | AATGGCGGCAGTTGCAAGGATGACATTAATTCCTATGAATGTT | 2664 |
| Glu78Lys | GGTGTCCCTTTGGATTTGAAGGAAAGAACTGTGAATTAGGTA | |
| tGAA-AAA | AGTAACTATTTTTTGAATACTCATGGTTCAAAGTTT | |
| | AAACTTTGAACCATGAGTATTCAAAAAATAGTTACTTACCTAAT | 2665 |
| | TCACAGTTCTTTCCTTCAAATCCAAAGGGACACCAACATTCAT | |
| | AGGAATTAATGTCATCCTTGCAACTGCCGCCATT | |
| | TTGGATTTGAAGGAAAG | 2666 |
| | CTTTCCTTCAAATCCAA | 2667 |
| Haemophilia B | GCGGCAGTTGCAAGGATGACATTAATTCCTATGAATGTTGGT | 2668 |
| Gly79Val | GTCCCTTTGGATTTGAAGGAAAGAACTGTGAATTAGGTAAGTA | |
| GGA-GTA | ACTATTTTTTGAATACTCATGGTTCAAAGTTTCCCT | |
| | AGGGAAACTTTGAACCATGAGTATTCAAAAAATAGTTACTTAC | 2669 |
| | CTAATTCACAGTTCTTTCCTTCAAATCCAAAGGGACACCAACA | |
| | TTCATAGGAATTAATGTCATCCTTGCAACTGCCGC | |
| | ATTTGAAGGAAAGAACT | 2670 |
| | AGTTCTTTCCTTCAAAT | 2671 |
| Haemophilia B | GGCGGCAGTTGCAAGGATGACATTAATTCCTATGAATGTTGG | 2672 |
| Gly79Arg | TGTCCCTTTGGATTTGAAGGAAAGAACTGTGAATTAGGTAAGT | |
| aGGA-AGA | AACTATTTTTTGAATACTCATGGTTCAAAGTTTCCC | |
| aGGA-AGA | GGGAAACTTTGAACCATGAGTATTCAAAAAATAGTTACTTACC | 2673 |
| | TAATTCACAGTTCTTTCCTTCAAATCCAAAGGGACACCAACAT | |
| | TCATAGGAATTAATGTCATCCTTGCAACTGCCGCC | |
| | GATTTGAAGGAAAGAAC | 2674 |
| | GTTCTTTCCTTCAAATC | 2675 |
| Haemophilia B | GCGGCAGTTGCAAGGATGACATTAATTCCTATGAATGTTGGT | 2676 |
| Gly79Glu | GTCCCTTTGGATTTGAAGGAAAGAACTGTGAATTAGGTAAGTA | |
| GGA-GAA | ACTATTTTTTGAATACTCATGGTTCAAAGTTTCCCT | |
| | AGGGAAACTTTGAACCATGAGTATTCAAAAAATAGTTACTTAC | 2677 |
| | CTAATTCACAGTTCTTTCCTTCAAATCCAAAGGGACACCAACA | |
| | TTCATAGGAATTAATGTCATCCTTGCAACTGCCGC | |
| | ATTTGAAGGAAAGAACT | 2678 |
| | AGTTCTTTCCTTCAAAT | 2679 |
| Haemophilia B | TTAGAAATGCATGTTAAATGATGCTGTTACTGTCTATTTTGCTT | 2680 |
| Cys88Ser | CTTTTAGATGTAACATGTAACATTAAGAATGGCAGATGCGAGC | |
| TGT-TCT | AGTTTTGTAAAAATAGTGCTGATAACAAGGTGGT | |
| | ACCACCTTGTTATCAGCACTATTTTTACAAAACTGCTCGCATC | 2681 |
| | TGCCATTCTTAATGTTACATGTTACATCTAAAAGAAGCAAAATA | |
| | GACAGTAACAGCATCATTTAACATGCATTTCTAA | |
| | TGTAACATGTAACATTA | 2682 |
| | TAATGTTACATGTTACA | 2683 |
| Haemophilia B | TTAGAAATGCATGTTAAATGATGCTGTTACTGTCTATTTTGCTT | 2684 |
| Cys88Phe | CTTTTAGATGTAACATGTAACATTAAGAATGGCAGATGCGAGC | |
| TGT-TTT | AGTTTTGTAAAAATAGTGCTGATAACAAGGTGGT | |
| | ACCACCTTGTTATCAGCACTATTTTTACAAAACTGCTCGCATC | 2685 |
| | TGCCATTCTTAATGTTACATGTTACATCTAAAAGAAGCAAAATA | |
| | GACAGTAACAGCATCATTTAACATGCATTTCTAA | |
| | TGTAACATGTAACATTA | 2686 |
| | TAATGTTACATGTTACA | 2687 |
| Haemophilia B | TTTAGAAATGCATGTTAAATGATGCTGTTACTGTCTATTTTGCT | 2688 |
| Cys88Arg | TCTTTTAGATGTAACATGTAACATTAAGAATGGCAGATGCGAG | |
| aTGT-CGT | CAGTTTTGTAAAAATAGTGCTGATAACAAGGTGG | |
| | CCACCTTGTTATCAGCACTATTTTTACAAAACTGCTCGCATCT | 2689 |
| | GCCATTCTTAATGTTACATGTTACATCTAAAAGAAGCAAAATA | |
| | GACAGTAACAGCATCATTTAACATGCATTTCTAAA | |
| | ATGTAACATGTAACATT | 2690 |
| | AATGTTACATGTTACAT | 2691 |
| Haemophilia B | TTAGAAATGCATGTTAAATGATGCTGTTACTGTCTATTTTGCTT | 2692 |
| Cys88Tyr | CTTTTAGATGTAACATGTAACATTAAGAATGGCAGATGCGAGC | |
| TGT-TAT | AGTTTTGTAAAAATAGTGCTGATAACAAGGTGGT | |
| | ACCACCTTGTTATCAGCACTATTTTTACAAAACTGCTCGCATC | 2693 |
| | TGCCATTCTTAATGTTACATGTTACATCTAAAAGAAGCAAAATA | |
| | GACAGTAACAGCATCATTTAACATGCATTTCTAA | |
| | TGTAACATGTAACATTA | 2694 |
| | TAATGTTACATGTTACA | 2695 |
| Haemophilia B | ATGCATGTTAAATGATGCTGTTACTGTCTATTTTGCTTCTTTTA | 2696 |
| Ile90Thr | GATGTAACATGTAACATTAAGAATGGCAGATGCGAGCAGTTTT | |
| ATT-ACT | GTAAAAATAGTGCTGATAACAAGGTGGTTTGCTC | |
| | GAGCAAACCACCTTGTTATCAGCACTATTTTTACAAAACTGCT | 2697 |
| | CGCATCTGCCATTCTTAATGTTACATGTTACATCTAAAAGAAG | |
| | CAAAATAGACAGTAACAGCATCATTTAACATGCAT | |
| | ATGTAACATTAAGAATG | 2698 |
| | CATTCTTAATGTTACAT | 2699 |
| Haemophilia B | TGTTAAATGATGCTGTTACTGTCTATTTTGCTTCTTTTAGATGT | 2700 |
| Asn92His | AACATGTAACATTAAGAATGGCAGATGCGAGCAGTTTTGTAAA | |
| gAAT-CAT | AATAGTGCTGATAACAAGGTGGTTTGCTCCTGTA | |
| | TACAGGAGCAAACCACCTTGTTATCAGCACTATTTTTACAAAA | 2701 |
| | CTGCTCGCATCTGCCATTCTTAATGTTACATGTTACATCTAAA | |
| | AGAAGCAAAATAGACAGTAACAGCATCATTTAACA | |
| | ACATTAAGAATGGCAGA | 2702 |
| | TCTGCCATTCTTAATGT | 2703 |
| Haemophilia B | TTAAATGATGCTGTTACTGTCTATTTTGCTTCTTTTAGATGTAA | 2704 |
| Asn92Lys | CATGTAACATTAAGAATGGCAGATGCGAGCAGTTTTGTAAAAA | |
| AATg-AAA | TAGTGCTGATAACAAGGTGGTTTGCTCCTGTACT | |
| | AGTACAGGAGCAAACCACCTTGTTATCAGCACTATTTTTACAA | 2705 |
| | AACTGCTCGCATCTGCCATTCTTAATGTTACATGTTACATCTA | |
| | AAAGAAGCAAAATAGACAGTAACAGCATCATTTAA | |
| | ATTAAGAATGGCAGATG | 2706 |
| | CATCTGCCATTCTTAAT | 2707 |
| Haemophilia B | AAATGATGCTGTTACTGTCTATTTTGCTTCTTTTAGATGTAACA | 2708 |
| Gly93Asp | TGTAACATTAAGAATGGCAGATGCGAGCAGTTTTGTAAAAATA | |
| GGC-GAC | GTGCTGATAACAAGGTGGTTTGCTCCTGTACTGA | |
| | TCAGTACAGGAGCAAACCACCTTGTTATCAGCACTATTTTTAC | 2709 |
| | AAAACTGCTCGCATCTGCCATTCTTAATGTTACATGTTACATC | |
| | TAAAAGAAGCAAAATAGACAGTAACAGCATCATTT | |
| | TAAGAATGGCAGATGCG | 2710 |
| | CGCATCTGCCATTCTTA | 2711 |
| Haemophilia B | TAAATGATGCTGTTACTGTCTATTTTGCTTCTTTTAGATGTAAC | 2712 |
| Gly93Ser | ATGTAACATTAAGAATGGCAGATGCGAGCAGTTTTGTAAAAAT | |
| tGGC-AGC | AGTGCTGATAACAAGGTGGTTTGCTCCTGTACTG | |
| | CAGTACAGGAGCAAACCACCTTGTTATCAGCACTATTTTTACA | 2713 |
| | AAACTGCTCGCATCTGCCATTCTTAATGTTACATGTTACATCT | |
| | AAAAGAAGCAAAATAGACAGTAACAGCATCATTTA | |
| | TTAAGAATGGCAGATGC | 2714 |
| | GCATCTGCCATTCTTAA | 2715 |
| Haemophilia B | GATGCTGTTACTGTCTATTTTGCTTCTTTTAGATGTAACATGTA | 2716 |
| Arg94Ser | ACATTAAGAATGGCAGATGCGAGCAGTTTTGTAAAAATAGTG | |
| AGAt-AGT | CTGATAACAAGGTGGTTTGCTCCTGTACTGAGGGA | |
| | TCCCTCAGTACAGGAGCAAACCACCTTGTTATCAGCACTATTT | 2717 |
| | TTACAAAACTGCTCGCATCTGCCATTCTTAATGTTACATGTTA | |
| | CATCTAAAAGAAGCAAAATAGACAGTAACAGCATC | |
| | AATGGCAGATGCGAGCA | 2118 |
| | TGCTCGCATCTGCCATT | 2719 |
| Haemophilia B | TGCTGTTACTGTCTATTTTGCTTCTTTTAGATGTAACATGTAAC | 2720 |
| Cys95Tyr | ATTAAGAATGGCAGATGCGAGCAGTTTTGTAAAAATAGTGCT | |
| TGC-TAC | GATAACAAGGTGGTTTGCTCCTGTACTGAGGGATA | |
| | TATCCCTCAGTACAGGAGCAAACCACCTTGTTATCAGCACTAT | 2721 |
| | TTTTACAAAACTGCTCGCATCTGCCATTCTTAATGTTACATGTT | |
| | ACATCTAAAAGAAGCAAAATAGACAGTAACAGCA | |
| | TGGCAGATGCGAGCAGT | 2722 |
| | ACTGCTCGCATCTGCCA | 2723 |
| Haemophilia B | GCTGTTACTGTCTATTTTGCTTCTTTTAGATGTAACATGTAACA | 2724 |
| Cys95Trp | TTAAGAATGGCAGATGCGAGCAGTTTTGTAAAAATAGTGCTG | |
| TGCg-TGG | ATAACAAGGTGGTTTGCTCCTGTACTGAGGGATAT | |
| | ATATCCCTCAGTACAGGAGCAAACCACCTTGTTATCAGCACTA | 2725 |
| | TTTTTACAAAACTGCTCGCATCTGCCATTCTTAATGTTACATGT | |
| | TACATCTAAAAGAAGCAAAATAGACAGTAACAGC | |
| | GGCAGATGCGAGCAGTT | 2726 |
| | AACTGCTCGCATCTGCC | 2727 |
| Haemophilia B | GCTGTTACTGTCTATTTTGCTTCTTTTAGATGTAACATGTAACA | 2728 |
| Cys95Term | TTAAGAATGGCAGATGCGAGCAGTTTTGTAAAAATAGTGCTG | |
| TGCg-TGA | ATAACAAGGTGGTTTGCTCCTGTACTGAGGGATAT | |
| | ATATCCCTCAGTACAGGAGCAAACCACCTTGTTATCAGCACTA | 2729 |
| | TTTTTACAAAACTGCTCGCATCTGCCATTCTTAATGTTACATGT | |
| | TACATCTAAAAGAAGCAAAATAGACAGTAACAGC | |
| | GGCAGATGCGAGCAGTT | 2730 |
| | AACTGCTCGCATCTGCC | 2731 |
| Haemophilia B | TACTGTCTATTTTGCTTCTTTTAGATGTAACATGTAACATTAAG | 2732 |
| Gln97Pro | AATGGCAGATGCGAGCAGTTTTGTAAAAATAGTGCTGATAAC | |
| CAG-CCG | AAGGTGGTTTGCTCCTGTACTGAGGGATATCGACT | |
| | AGTCGATATCCCTCAGTACAGGAGCAAACCACCTTGTTATCA | 2733 |
| | GCACTATTTTTACAAAACTGCTCGCATCTGCCATTCTTAATGTT | |
| | ACATGTTACATCTAAAAGAAGCAAAATAGACAGTA | |
| | ATGCGAGCAGTTTTGTA | 2734 |
| | TACAAAACTGCTCGCAT | 2735 |
| Haemophilia B | TTACTGTCTATTTTGCTTCTTTTAGATGTAACATGTAACATTAA | 2736 |
| Gln97Glu | GAATGGCAGATGCGAGCAGTTTTGTAAAAATAGTGCTGATAA | |
| gCAG-GAG | CAAGGTGGTTTGCTCCTGTACTGAGGGATATCGAC | |
| | GTCGATATCCCTCAGTACAGGAGCAAACCACCTTGTTATCAG | 2737 |
| | CACTATTTTTACAAAACTGCTCGCATCTGCCATTCTTAATGTTA | |
| | CATGTTACATCTAAAAGAAGCAAAATAGACAGTAA | |
| | GATGCGAGCAGTTTTGT | 2738 |
| | ACAAAACTGCTCGCATC | 2739 |
| Haemophilia B | TCTATTTTGCTTCTTTTAGATGTAACATGTAACATTAAGAATGG | 2740 |
| Cys99Arg | CAGATGCGAGCAGTTTTGTAAAAATAGTGCTGATAACAAGGT | |
| tTGT-CGT | GGTTTGCTCCTGTACTGAGGGATATCGACTTGCAG | |
| | CTGCAAGTCGATATCCCTCAGTACAGGAGCAAACCACCTTGT | 2741 |
| | TATCAGCACTATTTTTACAAAACTGCTCGCATCTGCCATTCTTA | |
| | ATGTTACATGTTACATCTAAAAGAAGCAAAATAGA | |
| | AGCAGTTTTGTAAAAAT | 2742 |
| | ATTTTTACAAAACTGCT | 2743 |
| Haemophilia B | CTATTTTGCTTCTTTTAGATGTAACATGTAACATTAAGAATGGC | 2744 |
| Cys99Tyr | AGATGCGAGCAGTTTTGTAAAAATAGTGCTGATAACAAGGTG | |
| TGT-TAT | GTTTGCTCCTGTACTGAGGGATATCGACTTGCAGA | |
| | TCTGCAAGTCGATATCCCTCAGTACAGGAGCAAACCACCTTG | 2745 |
| | TTATCAGCACTATTTTTACAAAACTGCTCGCATCTGCCATTCTT | |
| | AATGTTACATGTTACATCTAAAAGAAGCAAAATAG | |
| | GCAGTTTTGTAAAAATA | 2746 |
| | TATTTTTACAAAACTGC | 2747 |
| Warfarin sensitivity | TTTTTTGCTAAAACTAAAGAATTATTCTTTTACATTTCAGTTTTT | 2748 |
| Ala(−10)Thr | CTTGATCATGAAAACGCCAACAAAATTCTGAATCGGCCAAAGA | |
| cGCC-ACC | GGTATAATTCAGGTAAATTGGAAGAGTTTGTTC | |
| | GAACAAACTCTTCCAATTTACCTGAATTATACCTCTTTGGCCG | 2749 |
| | ATTCAGAATTTTGTTGGCGTTTTCATGATCAAGAAAAACTGAA | |
| | ATGTAAAAGAATAATTCTTTAGTTTTAGCAAAAAA | |
| | ATGAAAACGCCAACAAA | 2750 |
| | TTTGTTGGCGTTTTCAT | 2751 |
| Warfarin sensitivity | TTTTTGCTAAAACTAAAGAATTATTCTTTTACATTTCAGTTTTTC | 2752 |
| Ala(−10)Val | TTGATCATGAAAACGCCAACAAAATTCTGAATCGGCCAAAGA | |
| GCC-GTC | GGTATAATTCAGGTAAATTGGAAGAGTTTGTTCA | |
| | TGAACAAACTCTTCCAATTTACCTGAATTATACCTCTTTGGCC | 2753 |
| | GATTCAGAATTTTGTTGGCGTTTTCATGATCAAGAAAAACTGA | |
| | AATGTAAAAGAATAATTCTTTAGTTTTAGCAAAAA | |
| | TGAAAACGCCAACAAAA | 2754 |
| | TTTTGTTGGCGTTTTCA | 2755 |
| Haemophilia B | TGCAGCGCGTGAACATGATCATGGCAGAATCACCAGGCCTCA | 2756 |
| Gly(−26)Val | TCACCATCTGCCTTTTAGGATATCTACTCAGTGCTGAATGTAC | |
| GGA-GTA | AGGTTTGTTTCCTTTTTTAAAATACATTGAGTATGC | |
| | GCATACTCAATGTATTTTAAAAAAGGAAACAAACCTGTACATT | 2757 |
| | CAGCACTGAGTAGATATCCTAAAAGGCAGATGGTGATGAGGC | |
| | CTGGTGATTCTGCCATGATCATGTTCACGCGCTGCA | |
| | CCTTTTAGGATATCTAC | 2758 |
| | GTAGATATCCTAAAAGG | 2759 |
| Haemophilia B | TTATGCAGCGCGTGAACATGATCATGGCAGAATCACCAGGCC | 2760 |
| Leu(−27)Term | TCATCACCATCTGCCTTTTAGGATATCTACTCAGTGCTGAATG | |
| TTA-TAA | TACAGGTTTGTTTCCTTTTTTAAAATACATTGAGTA | |
| TTA-TAA | TACTCAATGTATTTTAAAAAAGGAAACAAACCTGTACATTCAG | 2761 |
| | CACTGAGTAGATATCCTAAAAGGCAGATGGTGATGAGGCCTG | |
| | GTGATTCTGCCATGATCATGTTCACGCGCTGCATAA | |
| | CTGCCTTTTAGGATATC | 2762 |
| | GATATCCTAAAAGGCAG | 2763 |
| Haemophilia B | TAGCAAAGGTTATGCAGCGCGTGAACATGATCATGGCAGAAT | 2764 |
| Ile(−30)Asn | CACCAGGCCTCATCACCATCTGCCTTTTAGGATATCTACTCAG | |
| ATC-AAC | TGCTGAATGTACAGGTTTGTTTCCTTTTTTAAAATA | |
| | TATTTTAAAAAAGGAAACAAACCTGTACATTCAGCACTGAGTA | 2765 |
| | GATATCCTAAAAGGCAGATGGTGATGAGGCCTGGTGATTCTG | |
| | CCATGATCATGTTCACGCGCTGCATAACCTTTGCTA | |
| | CATCACCATCTGCCTTT | 2766 |
| | AAAGGCAGATGGTGATG | 2767 |
| Haemophilia B | ACTAATCGACCTTACCACTTTCACAATCTGCTAGCAAAGGTTA | 2768 |
| Ile(−40)Phe | TGCAGCGCGTGAACATGATCATGGCAGAATCACCAGGCCTCA | |
| gATC-TTC | TCACCATCTGCCTTTTAGGATATCTACTCAGTGCTG | |
| | CAGCACTGAGTAGATATCCTAAAAGGCAGATGGTGATGAGGC | 2769 |
| | CTGGTGATTCTGCCATGATCATGTTCACGCGCTGCATAACCTT | |
| | TGCTAGCAGATTGTGAAAGTGGTAAGGTCGATTAGT | |
| | TGAACATGATCATGGCA | 2770 |
| | TGCCATGATCATGTTCA | 2771 |
| Haemophilia B | ACTTTGGTACAACTAATCGACCTTACCACTTTCACAATCTGCT | 2772 |
| Arg(−44)His | AGCAAAGGTTATGCAGCGCGTGAACATGATCATGGCAGAATC | |
| CGC-CAC | ACCAGGCCTCATCACCATCTGCCTTTTAGGATATCT | |
| | AGATATCCTAAAAGGCAGATGGTGATGAGGCCTGGTGATTCT | 2773 |
| | GCCATGATCATGTTCACGCGCTGCATAACCTTTGCTAGCAGA | |
| | TTGTGAAAGTGGTAAGGTCGATTAGTTGTACCAAAGT | |
| | TATGCAGCGCGTGAACA | 2774 |
| | TGTTCACGCGCTGCATA | 2775 |

### EXAMPLE 16

### Alpha Thalassemia Hemoglobin Alpha Locus 1

[0231] The thalassemia syndromes are a heterogeneous group of inherited anemias characterized by defects in the synthesis of one or more globin chain subunits. For example, beta-thalassemia discussed in Example 6, is caused by a decrease in beta-chain production relative to alpha-chain production; the converse is the case for alpha-thalassemia. The attached table discloses the correcting oligonucleotide base sequences for the hemoglobin alpha locus 1 oligonucleotides of the invention.

TABLE 18
HBA1 Mutations and Genome-Correcting Oligos

| Clinical Phenotype & | | SEQ ID |
|---|---|---|
| Mutation | Correcting Oligos | NO: |
| Thalassaemia alpha | CCCTGGCGCGCTCGCGGCCCGGCACTCTTCTGGTCCCCACA | 2776 |
| Met(−1)Val | GACTCAGAGAGAACCCACCATGGTGCTGTCTCCTGCCGACAA | |
| cATG-GTG | GACCAACGTCAAGGCCGCCTGGGGTAAGGTCGGCGCGC | |
| | GCGCGCCGACCTTACCCCAGGCGGCCTTGACGTTGGTCTTG | 2777 |
| | TCGGCAGGAGACAGCACCATGGTGGGTTCTCTCTGAGTCTGT | |
| | GGGGACCAGAAGAGTGCCGGGCCGCGAGCGCGCCAGGG | |
| | AACCCACCATGGTGCTG | 2778 |
| | CAGCACCATGGTGGGTT | 2779 |
| Haemoglobin variant | CACAGACTCAGAGAGAACCCACCATGGTGCTGTCTCCTGCCG | 2780 |
| Ala12Asp | ACAAGACCAACGTCAAGGCCGCCTGGGGTAAGGTCGGCGCG | |
| GCC-GAC | CACGCTGGCGAGTATGGTGCGGAGGCCCTGGAGAGGTG | |
| | CACCTCTCCAGGGCCTCCGCACCATACTCGCCAGCGTGCGC | 2781 |
| | GCCGACCTTACCCCAGGCGGCCTTGACGTTGGTCTTGTCGG | |
| | CAGGAGACAGCACCATGGTGGGTTCTCTCTGAGTCTGTG | |
| | CGTCAAGGCCGCCTGGG | 2782 |
| | CCCAGGCGGCCTTGACG | 2783 |
| Haemoglobin variant | AGAGAGAACCCACCATGGTGCTGTCTCCTGCCGACAAGACCA | 2784 |
| Gly15Asp | ACGTCAAGGCCGCCTGGGGTAAGGTCGGCGCGCACGCTGG | |
| GGT-GAT | CGAGTATGGTGCGGAGGCCCTGGAGAGGTGAGGCTCCCT | |
| | AGGGAGCCTCACCTCTCCAGGGCCTCCGCACCATACTCGCC | 2785 |
| | AGCGTGCGCGCCGACCTTACCCCAGGCGGCCTTGACGTTGG | |
| | TCTTGTCGGCAGGAGACAGCACCATGGTGGGTTCTCTCT | |
| | CGCCTGGGGTAAGGTCG | 2786 |
| | CGACCTTACCCCAGGCG | 2787 |
| Haemoglobin variant | CTGCCGACAAGACCAACGTCAAGGCCGCCTGGGGTAAGGTC | 2788 |
| Tyr24Cys | GGCGCGCACGCTGGCGAGTATGGTGCGGAGGCCCTGGAGA | |
| TAT-TGT | GGTGAGGCTCCCTCCCCTGCTCCGACCCGGGCTCCTCGCC | |
| | GGCGAGGAGCCCGGGTCGGAGCAGGGGAGGGAGCCTCACC | 2789 |
| | TCTCCAGGGCCTCCGCACCATACTCGCCAGCGTGCGCGCCG | |
| | ACCTTACCCCAGGCGGCCTTGACGTTGGTCTTGTCGGCAG | |
| | TGGCGAGTATGGTGCGG | 2790 |
| | CCGCACCATACTCGCCA | 2791 |
| Haemoglobin variant | GACCAACGTCAAGGCCGCCTGGGGTAAGGTCGGCGCGCAC | 2792 |
| Glu27Asp | GCTGGCGAGTATGGTGCGGAGGCCCTGGAGAGGTGAGGCT | |
| GAGg-GAT | CCCTCCCCTGCTCCGACCCGGGCTCCTCGCCCGCCCGGACC | |
| | GGTCCGGGCGGGCGAGGAGCCCGGGTCGGAGCAGGGGAG | 2793 |
| | GGAGCCTCACCTCTCCAGGGCCTCCGCACCATACTCGCCAG | |
| | CGTGCGCGCCGACCTTACCCCAGGCGGCCTTGACGTTGGTC | |
| | GGTGCGGAGGCCCTGGA | 2794 |
| | TCCAGGGCCTCCGCACC | 2795 |
| Haemoglobin variant | GAGCCACGGCTCTGCCCAGGTTAAGGGCCACGGCAAGAAGG | 2796 |
| Asn68Lys | TGGCCGACGCGCTGACCAACGCCGTGGCGCACGTGGACGA | |
| AACg-AAG | CATGCCCAACGCGCTGTCCGCCCTGAGCGACCTGCACGCG | |
| | CGCGTGCAGGTCGCTCAGGGCGGACAGCGCGTTGGGCATGT | 2797 |
| | CGTCCACGTGCGCCACGGCGTTGGTCAGCGCGTCGGCCACC | |
| | TTCTTGCCGTGGCCCTTAACCTGGGCAGAGCCGTGGCTC | |
| | CTGACCAACGCCGTGGC | 2798 |
| | GCCACGGCGTTGGTCAG | 2799 |
| Haemoglobin variant | AGGTTAAGGGCCACGGCAAGAAGGTGGCCGACGCGCTGACC | 2800 |
| Asp74Gly | AACGCCGTGGCGCACGTGGACGACATGCCCAACGCGCTGTC | |
| GAC-GGC | CGCCCTGAGCGACCTGCACGCGCACAAGCTTCGGGTGGA | |
| | TCCACCCGAAGCTTGTGCGCGTGCAGGTCGCTCAGGGCGGA | 2801 |
| | CAGCGCGTTGGGCATGTCGTCCACGTGCGCCACGGCGTTGG | |
| | TCAGCGCGTCGGCCACCTTCTTGCCGTGGCCCTTAACCT | |
| | GCACGTGGACGACATGC | 2802 |
| | GCATGTCGTCCACGTGC | 2803 |
| Haemoglobin variant | CAGGTTAAGGGCCACGGCAAGAAGGTGGCCGACGCGCTGAC | 2804 |
| Asp74His | CAACGCCGTGGCGCACGTGGACGACATGCCCAACGCGCTGT | |
| gGAC-CAC | CCGCCCTGAGCGACCTGCACGCGCACAAGCTTCGGGTGG | |
| | CCACCCGAAGCTTGTGCGCGTGCAGGTCGCTCAGGGCGGAC | 2805 |
| | AGCGCGTTGGGCATGTCGTCCACGTGCGCCACGGCGTTGGT | |
| | CAGCGCGTCGGCCACCTTCTTGCCGTGGCCCTTAACCTG | |
| | CGCACGTGGACGACATG | 2806 |
| | CATGTCGTCCACGTGCG | 2807 |
| Haemoglobin variant | CACGGCAAGAAGGTGGCCGACGCGCTGACCAACGCCGTGG | 2808 |
| Asn78His | CGCACGTGGACGACATGCCCAACGCGCTGTCCGCCCTGAGC | |
| cAAC-CAC | GACCTGCACGCGCACAAGCTTCGGGTGGACCCGGTCAACT | |
| | AGTTGACCGGGTCCACCCGAAGCTTGTGCGCGTGCAGGTCG | 2809 |
| | CTCAGGGCGGACAGCGCGTTGGGCATGTCGTCCACGTGCGC | |
| | CACGGCGTTGGTCAGCGCGTCGGCCACCTTCTTGCCGTG | |
| | ACATGCCCAACGCGCTG | 2810 |
| | CAGCGCGTTGGGCATGT | 2811 |
| Haemoglobin variant | ACCAACGCCGTGGCGCACGTGGACGACATGCCCAACGCGCT | 2812 |
| His87Tyr | GTCCGCCCTGAGCGACCTGCACGCGCACAAGCTTCGGGTGG | |
| gCAC-TAC | ACCCGGTCAACTTCAAGGTGAGCGGCGGGCCGGGAGCGA | |
| | TCGCTCCCGGCCCGCCGCTCACCTTGAAGTTGACCGGGTCC | 2813 |
| | ACCCGAAGCTTGTGCGCGTGCAGGTCGCTCAGGGCGGACAG | |
| | CGCGTTGGGCATGTCGTCCACGTGCGCCACGGCGTTGGT | |
| | GCGACCTGCACGCGCAC | 2814 |
| | GTGCGCGTGCAGGTCGC | 2815 |
| Haemoglobin variant | GGCGCACGTGGACGACATGCCCAACGCGCTGTCCGCCCTGA | 2816 |
| Lys90Asn | GCGACCTGCACGCGCACAAGCTTCGGGTGGACCCGGTCAAC | |
| AAGc-AAC | TTCAAGGTGAGCGGCGGGCCGGGAGCGATCTGGGTCGAG | |
| | CTCGACCCAGATCGCTCCCGGCCCGCCGCTCACCTTGAAGT | 2817 |
| | TGACCGGGTCCACCCGAAGCTTGTGCGCGTGCAGGTCGCTC | |
| | AGGGCGGACAGCGCGTTGGGCATGTCGTCCACGTGCGCC | |
| | GCGCACAAGCTTCGGGT | 2818 |
| | ACCCGAAGCTTGTGCGC | 2819 |
| Haemoglobin variant | TGGCGCACGTGGACGACATGCCCAACGCGCTGTCCGCCCTG | 2820 |
| Lys90Thr | AGCGACCTGCACGCGCACAAGCTTCGGGTGGACCCGGTCAA | |
| AAG-ACG | CTTCAAGGTGAGCGGCGGGCCGGGAGCGATCTGGGTCGA | |
| | TCGACCCAGATCGCTCCCGGCCCGCCGCTCACCTTGAAGTT | 2821 |
| | GACCGGGTCCACCCGAAGCATGTGCGCGTGCAGGTCGCTCA | |
| | GGGCGGACAGCGCGTTGGGCATGTCGTCCACGTGCGCCA | |
| | CGCGCACAAGCTTCGGG | 2822 |
| | CCCGAAGCATGTGCGCG | 2823 |
| Haemoglobin variant | ACGTGGACGACATGCCCAACGCGCTGTCCGCCCTGAGCGAC | 2824 |
| Arg92Gln | CTGCACGCGCACAAGCTTCGGGTGGACCCGGTCAACTTCAA | |
| CGG-CAG | GGTGAGCGGCGGGCCGGGAGCGATCTGGGTCGAGGGGCG | |
| | CGCCCCTCGACCCAGATCGCTCCCGGCCCGCCGCTCACCTT | 2825 |
| | GAAGTTGACCGGGTCCACCCGAAGCTTGTGCGCGTGCAGGT | |
| | CGCTCAGGGCGGACAGCGCGTTGGGCATGTCGTCCACGT | |
| | CAAGCTTCGGGTGGACC | 2826 |
| | GGTCCACCCGAAGCTTG | 2827 |
| Haemoglobin variant | ACGACATGCCCAACGCGCTGTCCGCCCTGAGCGACCTGCAC | 2828 |
| Asp94Gly | GCGCACAAGCTTCGGGTGGACCCGGTCAACTTCAAGGTGAG | |
| GAC-GGC | CGGCGGGCCGGGAGCGATCTGGGTCGAGGGGCGAGATGG | |
| | CCATCTCGCCCCTCGACCCAGATCGCTCCCGGCCCGCCGCT | 2829 |
| | CACCTTGAAGTTGACCGGGTCCACCCGAAGCTTGTGCGCGT | |
| | GCAGGTCGCTCAGGGCGGACAGCGCGTTGGGCATGTCGT | |
| | TCGGGTGGACCCGGTCA | 2830 |
| | TGACCGGGTCCACCCGA | 2831 |
| Haemoglobin variant | ACATGCCCAACGCGCTGTCCGCCCTGAGCGACCTGCACGCG | 2832 |
| Pro95Arg | CACAAGCTTCGGGTGGACCCGGTCAACTTCAAGGTGAGCGG | |
| CCG-CGG | CGGGCCGGGAGCGATCTGGGTCGAGGGGCGAGATGGCGC | |
| | GCGCCATCTCGCCCCTCGACCCAGATCGCTCCCGGCCCGCC | 2833 |
| | GCTCACCTTGAAGTTGACCGGGTCCACCCGAAGCTTGTGCG | |
| | CGTGCAGGTCGCTCAGGGCGGACAGCGCGTTGGGCATGT | |
| | GGTGGACCCGGTCAACT | 2834 |
| | AGTTGACCGGGGTCCACC | 2835 |
| Haemoglobin variant | CGGCGGCTGCGGGCCTGGGCCCTCGGCCCCACTGACCCTC | 2836 |
| Ser102Arg | TTCTCTGCACAGCTCCTAAGCCACTGCCTGCTGGTGACCCTG | |
| AGCc-AGA | GCCGCCCACCTCCCCGCCGAGTTCACCCCTGCGGTGCAC | |
| | GTGCACCGCAGGGGTGAACTCGGCGGGGAGGTGGGCGGCC | 2837 |
| | AGGGTCACCAGCAGGCAGTGGCTTAGGAGCTGTGCAGAGAA | |
| | GAGGGTCAGTGGGGCCGAGGGCCCAGGCCCGCAGCCGCCG | |
| | CTCCTAAGCCACTGCCT | 2838 |
| | AGGCAGTGGCTTAGGAG | 2839 |
| Haemoglobin variant | TTCTCTGCACAGCTCCTAAGCCACTGCCTGCTGGTGACCCTG | 2840 |
| Glu116Lys | GCCGCCCACCTCCCCGCCGAGTTCACCCCTGCGGTGCACGC | |
| cGAG-AAG | CTCCCTGGACAAGTTCCTGGCTTCTGTGAGCACCGTGC | |
| | GCACGGTGCTCACAGAAGCCAGGAACTTGTCCAGGGAGGCG | 2841 |
| | TGCACCGCAGGGGTGAACTCGGCGGGGAGGTGGGCGGCCA | |
| | GGGTCACCAGCAGGCAGTGGCTTAGGAGCTGTGCAGAGAA | |
| | TCCCCGCCGAGTTCACC | 2842 |
| | GGTGAACTCGGCGGGGA | 2843 |
| Haemoglobin variant | TCCTAAGCCACTGCCTGCTGGTGACCCTGGCCGCCCACCTC | 2844 |
| Ala120Glu | CCCGCCGAGTTCACCCCTGCGGTGCACGCCTCCCTGGACAA | |
| GCG-GAG | GTTCCTGGCTTCTGTGAGCACCGTGCTGACCTCCAAATA | |
| | TATTTGGAGGTCAGCACGGTGCTCACAGAAGCCAGGAACTTG | 2845 |
| | TCCAGGGAGGCGTGCACCGCAGGGGTGAACTCGGCGGGGA | |
| | GGTGGGCGGCCAGGGTCACCAGCAGGCAGTGGCTTAGGA | |
| | CACCCCTGCGGTGCACG | 2846 |
| | CGTGCACCGCAGGGGTG | 2847 |
| Thalassaemia alpha | TGGCCGCCCACCTCCCCGCCGAGTTCACCCCTGCGGTGCAC | 2848 |
| Leu129Pro | GCCTCCCTGGACAAGTTCCTGGCTTCTGTGAGCACCGTGCTG | |
| CTG-CCG | ACCTCCAAATACCGTTAAGCTGGAGCCTCGGTGGCCAT | |
| | ATGGCCACCGAGGCTCCAGCTTAACGGTATTTGGAGGTCAGC | 2849 |
| | ACGGTGCTCACAGAAGCCAGGAACTTGTCCAGGGAGGCGTG | |
| | CACCGCAGGGGTGAACTCGGCGGGGAGGTGGGCGGCCA | |
| | CAAGTTCCTGGCTTCTG | 2850 |
| | CAGAAGCCAGGAACTTG | 2851 |
| Haemoglobin variant | TGCACGCCTCCCTGGACAAGTTCCTGGCTTCTGTGAGCACCG | 2852 |
| Arg141Leu | TGCTGACCTCCAAATACCGTTAAGCTGGAGCCTCGGTGGCCA | |
| CGT-CTT | TGCTTCTTGCCCCTTGGGCCTCCCCCCAGCCCCTCCT | |
| | AGGAGGGGCTGGGGGGAGGCCCAAGGGGCAAGAAGCATGG | 2853 |
| | CCACCGAGGCTCCAGCTTAACGGTATTTGGAGGTCAGCACG | |
| | GTGCTCACAGAAGCCAGGAACTTGTCCAGGGAGGCGTGCA | |
| | CAAATACCGTTAAGCTG | 2854 |
| | CAGCTTAACGGTATTTG | 2855 |

### EXAMPLE 17

### Alpha-Thalassemia—Hemoglobin Alpha Locus 2

[0232] The attached table discloses the correcting oligonucleotide base sequences for the hemoglobin alpha locus 2 oligonucleotides of the invention.

TABLE 19
HBA2 Mutations and Genome-Correcting Oligos

| Clinical Phenotype & | | SEQ ID |
|---|---|---|
| Mutation | Correcting Oligos | NO: |
| Thalassaemia alpha | CCTGGCGCGCTCGCGGGCCGGCACTCTTCTGGTCCCCACAG | 2856 |
| Met(−1)Thr | ACTCAGAGAGAACCCACCATGGTGCTGTCTCCTGCCGACAAG | |
| ATG-ACG | ACCAACGTCAAGGCCGCCTGGGGTAAGGTCGGCGCGCA | |
| | TGCGCGCCGACCTTACCCCAGGCGGCCTTGACGTTGGTCTT | 2857 |
| | GTCGGCAGGAGACAGCACCATGGTGGGTTCTCTCTGAGTCT | |
| | GTGGGGACCAGAAGAGTGCCGGCCCGCGAGCGCGCCAGG | |
| | ACCCACCATGGTGCTGT | 2858 |
| | ACAGCACCATGGTGGGT | 2859 |
| Haemoglobin variant | CACAGACTCAGAGAGAACCCACCATGGTGCTGTCTCCTGCCG | 2860 |
| Ala12Asp | ACAAGACCAACGTCAAGGCCGCCTGGGGTAAGGTCGGCGCG | |
| GCC-GAC | CACGCTGGCGAGTATGGTGCGGAGGCCCTGGAGAGGTG | |
| | CACCTCTCCAGGGCCTCCGCACCATACTCGCCAGCGTGCGC | 2861 |
| | GCCGACCTTACCCCAGGCGGCCTTGACGTTGGTCTTGTCGG | |
| | CAGGAGACAGCACCATGGTGGGTTCTCTCTGAGTCTGTG | |
| | CGTCAAGGCCGCCTGGG | 2862 |
| | CCCAGGCGGCCTTGACG | 2863 |
| Haemoglobin variant | AGAGAACCCACCATGGTGCTGTCTCCTGCCGACAAGACCAAC | 2864 |
| Lys16Glu | GTCAAGGCCGCCTGGGGTAAGGTCGGCGCGCACGCTGGCG | |
| tAAG-GAG | AGTATGGTGCGGAGGCCCTGGAGAGGTGAGGCTCCCTCC | |
| | GGAGGGAGCCTCACCTCTCCAGGGCCTCCGCACCATACTCG | 2865 |
| | CCAGCGTGCGCGCCGACCTTACCCCAGGCGGCCTTGACGTT | |
| | GGTCTTGTCGGCAGGAGACAGCACCATGGTGGGTTCTCT | |
| | CCTGGGGTAAGGTCGGC | 2866 |
| | GCCGACCTTACCCCAGG | 2867 |
| Haemoglobin variant | GGTGCTGTCTCCTGCCGACAAGACCAACGTCAAGGCCGCCT | 2868 |
| His20Gln | GGGGTAAGGTCGGCGCGCACGCTGGCGAGTATGGTGCGGA | |
| CACg-CAA | GGCCCTGGAGAGGTGAGGCTCCCTCCCCTGCTCCGACCCG | |
| | CGGGTCGGAGCAGGGGAGGGAGCCTCACCTCTCCAGGGCC | 2869 |
| | TCCGCACCATACTCGCCAGCGTGCGCGCCGACCTTACCCCA | |
| | GGCGGCCTTGACGTTGGTCTTGTCGGCAGGAGACAGCACC | |
| | GGCGCGCACGCTGGCGA | 2870 |
| | TCGCCAGCGTGCGCGCC | 2871 |
| Haemoglobin variant | GACCAACGTCAAGGCCGCCTGGGGTAAGGTCGGCGCGCAC | 2872 |
| Glu27Asp | GCTGGCGAGTATGGTGCGGAGGCCCTGGAGAGGTGAGGCT | |
| GAGg-GAC | CCCTCCCCTGCTCCGACCCGGGCTCCTCGCCCGCCCGGACC | |
| | GGTCCGGGCGGGCGAGGAGCCCGGGTCGGAGCAGGGGAG | 2873 |
| | GGAGCCTCACCTCTCCAGGGCCTCCGCACCATACTCGCCAG | |
| | CGTGCGCGCCGACCTTACCCCAGGCGGCCTTGACGTTGGTC | |
| | GGTGCGGAGGCCCTGGA | 2874 |
| | TCCAGGGCCTCCGCACC | 2875 |
| Thalassaemia alpha | ACGTCAAGGCCGCCTGGGGTAAGGTCGGCGCGCACGCTGG | 2876 |
| Leu29Pro | CGAGTATGGTGCGGAGGCCCTGGAGAGGTGAGGCTCCCTCC | |
| CTG-CCG | CCTGCTCCGACCCGGGCTCCTCGCCCGCCCGGACCCACAG | |
| | CTGTGGGTCCGGGCGGGCGAGGAGCCCGGGTCGGAGCAGG | 2877 |
| | GGAGGGAGCCTCACCTCTCCAGGGCCTCCGCACCATACTCG | |
| | CCAGCGTGCGCGCCGACCTTACCCCAGGCGGCCTTGACGT | |
| | GGAGGCCCTGGAGAGGT | 2878 |
| | ACCTCTCCAGGGCCTCC | 2879 |
| Haemoglobin variant | GCTTCTCCCCGCAGGATGTTCCTGTCCTTCCCCACCACCAAG | 2880 |
| Asp47His | ACCTACTTCCCGCACTTCGACCTGAGCCACGGCTCTGCCCAG | |
| cGAC-CAC | GTTAAGGGCCACGGCAAGAAGGTGGCCGACGCGCTGA | |
| | TCAGCGCGTCGGCCACCTTCTTGCCGTGGCCCTTAACCTGG | 2881 |
| | GCAGAGCCGTGGCTCAGGTCGAAGTGCGGGAAGTAGGTCTT | |
| | GGTGGTGGGGAAGGACAGGAACATCCTGCGGGGAGAAGC | |
| | CGCACTTCGACCTGAGC | 2882 |
| | GCTCAGGTCGAAGTGCG | 2883 |
| Haemoglobin variant | CTCCCCGCAGGATGTTCCTGTCCTTCCCCACCACCAAGACCT | 2884 |
| Leu48Arg | ACTTCCCGCACTTCGACCTGAGCCACGGCTCTGCCCAGGTTA | |
| CTG-CGG | AGGGCCACGGCAAGAAGGTGGCCGACGCGCTGACCAA | |
| | TTGGTCAGCGCGTCGGCCACCTTCTTGCCGTGGCCCTTAACC | 2885 |
| | TGGGCAGAGCCGTGGCTCAGGTCGAAGTGCGGGAAGTAGGT | |
| | CTTGGTGGTGGGGAAGGACAGGAACATCCTGCGGGGAG | |
| | CTTCGACCTGAGCCACG | 2886 |
| | CGTGGCTCAGGTCGAAG | 2887 |
| Haemoglobin variant | CTGTCCTTCCCCACCACCAAGACCTACTTCCCGCACTTCGAC | 2888 |
| Gln54Glu | CTGAGCCACGGCTCTGCCCAGGTTAAGGGCCACGGCAAGAA | |
| cCAG-GAG | GGTGGCCGACGCGCTGACCAACGCCGTGGCGCACGTGG | |
| | CCACGTGCGCCACGGCGTTGGTCAGCGCGTCGGCCACCTTC | 2889 |
| | TTGCCGTGGCCCTTAACCTGGGCAGAGCCGTGGCTCAGGTC | |
| | GAAGTGCGGGAAGTAGGTCTTGGTGGTGGGGAAGGACAG | |
| | GCTCTGCCCAGGTTAAG | 2890 |
| | CTTAACCTGGGCAGAGC | 2891 |
| Haemoglobin variant | CCAAGACCTACTTCCCGCACTTCGACCTGAGCCACGGCTCTG | 2892 |
| Gly59Asp | CCCAGGTTAAGGGCCACGGCAAGAAGGTGGCCGACGCGCTG | |
| GGC-GAC | ACCAACGCCGTGGCGCACGTGGACGACATGCCCAACGC | |
| | GCGTTGGGCATGTCGTCCACGTGCGCCACGGCGTTGGTCAG | 2893 |
| | CGCGTCGGCCACCTTCTTGCCGTGGCCCTTAACCTGGGCAG | |
| | AGCCGTGGCTCAGGTCGAAGTGCGGGAAGTAGGTCTTGG | |
| | GGGCCACGGCAAGAAGG | 2894 |
| | CCTTCTTGCCGTGGCCC | 2895 |
| Haemoglobin variant | GAGCCACGGCTCTGCCCAGGTTAAGGGCCACGGCAAGAAGG | 2896 |
| Asn68Lys | TGGCCGACGCGCTGACCAACGCCGTGGCGCACGTGGACGA | |
| AACg-AAG | CATGCCCAACGCGCTGTCCGCCCTGAGCGACCTGCACGCG | |
| | CGCGTGCAGGTCGCTCAGGGCGGACAGCGCGTTGGGCATGT | 2897 |
| | CGTCCACGTGCGCCACGGCGTTGGTCAGCGCGTCGGCCACC | |
| | TTCTTGCCGTGGCCCTTAACCTGGGCAGAGCCGTGGCTC | |
| | CTGACCAACGCCGTGGC | 2898 |
| | GCCACGGCGTTGGTCAG | 2899 |
| Haemoglobin variant | GAGCCACGGCTCTGCCCAGGTTAAGGGCCACGGCAAGAAGG | 2900 |
| Asn68Lys | TGGCCGACGCGCTGACCAACGCCGTGGCGCACGTGGACGA | |
| AACg-AAA | CATGCCCAACGCGCTGTCCGCCCTGAGCGACCTGCACGCG | |
| | CGCGTGCAGGTCGCTCAGGGCGGACAGCGCGTTGGGCATGT | 2901 |
| | CGTCCACGTGCGCCACGGCGTTGGTCAGCGCGTCGGCCACC | |
| | TTCTTGCCGTGGCCCTTAACCTGGGCAGAGCCGTGGCTC | |
| | CTGACCAACGCCGTGGC | 2902 |
| | GCCACGGCGTTGGTCAG | 2903 |
| Haemoglobin variant | CGGCAAGAAGGTGGCCGACGCGCTGACCAACGCCGTGGCG | 2904 |
| Asn78Lys | CACGTGGACGACATGCCCAACGCGCTGTCCGCCCTGAGCGA | |
| AACg-AAA | CCTGCACGCGCACAAGCTTCGGGTGGACCCGGTCAACTTC | |
| | GAAGTTGACCGGGTCCACCCGAAGCTTGTGCGCGTGCAGGT | 2905 |
| | CGCTCAGGGCGGACAGCGCGTTGGGCATGTCGTCCACGTGC | |
| | GCCACGGCGTTGGTCAGCGCGTCGGCCACCTTCTTGCCG | |
| | ATGCCCAACGCGCTGTC | 2906 |
| | GACAGCGCGTTGGGCAT | 2907 |
| Haemoglobin variant | CGCTGACCAACGCCGTGGCGCACGTGGACGACATGCCCAAC | 2908 |
| Asp85Val | GCGCTGTCCGCCCTGAGCGACCTGCACGCGCACAAGCTTCG | |
| GAC-GTC | GGTGGACCCGGTCAACTTCAAGGTGAGCGGCGGGCCGGG | |
| | CCCGGCCCGCCGCTCACCTTGAAGTTGACCGGGTCCACCCG | 2909 |
| | AAGCTTGTGCGCGTGCAGGTCGCTCAGGGCGGACAGCGCGT | |
| | TGGGCATGTCGTCCACGTGCGCCACGGCGTTGGTCAGCG | |
| | CCTGAGCGACCTGCACG | 2910 |
| | CGTGCAGGTCGCTCAGG | 2911 |
| Haemoglobin variant | GGCGCACGTGGACGACATGCCCAACGCGCTGTCCGCCCTGA | 2912 |
| Lys90Asn | GCGACCTGCACGCGCACAAGCTTCGGGTGGACCCGGTCAAC | |
| AAGc-AAT | TTCAAGGTGAGCGGCGGGCCGGGAGCGATCTGGGTCGAG | |
| | CTCGACCCAGATCGCTCCCGGCCCGCCGCTCACCTTGAAGT | 2913 |
| | TGACCGGGTCCACCCGAAGCTTGTGCGCGTGCAGGTCGCTC | |
| | AGGGCGGACAGCGCGTTGGGCATGTCGTCCACGTGCGCC | |
| | GCGCACAAGCTTCGGGT | 2914 |
| | ACCCGAAGCTTGTGCGC | 2915 |
| Haemoglobin variant | GACGACATGCCCAACGCGCTGTCCGCCCTGAGCGACCTGCA | 2916 |
| Asp94His | CGCGCACAAGCTTCGGGTGGACCCGGTCAACTTCAAGGTGA | |
| gGAC-CAC | GCGGCGGGCCGGGAGCGATCTGGGTCGAGGGGCGAGATG | |
| | CATCTCGCCCCTCGACCCAGATCGCTCCCGGCCCGCCGCTC | 2917 |
| | ACCTTGAAGTTGACCGGGTCCACCCGAAGCTTGTGCGCGTG | |
| | CAGGTCGCTCAGGGCGGACAGCGCGTTGGGCATGTCGTC | |
| | TTCGGGTGGACCCGGTC | 2918 |
| | GACCGGGTCCACCCGAA | 2919 |
| Haemoglobin variant | ACATGCCCAACGCGCTGTCCGCCCTGAGCGACCTGCACGCG | 2920 |
| Pro95Leu | CACAAGCTTCGGGTGGACCCGGTCAACTTCAAGGTGAGCGG | |
| CCG-CTG | CGGGCCGGGAGCGATCTGGGTCGAGGGGCGAGATGGCGC | |
| | GCGCCATCTCGCCCCTCGACCCAGATCGCTCCCGGCCCGCC | 2921 |
| | GCTCACCTTGAAGTTGACCGGGTCCACCCGAAGCTTGTGCG | |
| | CGTGCAGGTCGCTCAGGGCGGACAGCGCGTTGGGCATGT | |
| | GGTGGACCCGGTCAACT | 2922 |
| | AGTTGACCGGGTCCACC | 2923 |
| Haemoglobin variant | TAGCGCAGGCGGCGGCTGCGGGCCTGGGCCGCACTGACCC | 2924 |
| Ser102Arg | TCTTCTCTGCACAGCTCCTAAGCCACTGCCTGCTGGTGACCC | |
| aAGC-CGC | TGGCCGCCCACCTCCCCGCCGAGTTCACCCCTGCGGTGC | |
| | GCACCGCAGGGGTGAACTCGGCGGGGAGGTGGGCGGCCAG | 2925 |
| | GGTCACCAGCAGGCAGTGGCTTAGGAGCTGTGCAGAGAAGA | |
| | GGGTCAGTGCGGCCCAGGCCCGCAGCCGCCGCCTGCGCTA | |
| | AGCTCCTAAGCCACTGC | 2926 |
| | GCAGTGGCTTAGGAGCT | 2927 |
| Haemoglobin H disease | GGCGGCGGCTGCGGGCCTGGGCCGCACTGACCCTCTTCTCT | 2928 |
| Cys104Tyr | GCACAGCTCCTAAGCCACTGCCTGCTGGTGACCCTGGCCGC | |
| TGC-TAC | CCACCTCCCCGCCGAGTTCACCCCTGCGGTGCACGCCTC | |
| | GAGGCGTGCACCGCAGGGGTGAACTCGGCGGGGAGGTGGG | 2929 |
| | CGGCCAGGGTCACCAGCAGGCAGTGGCTTAGGAGCTGTGCA | |
| | GAGAAGAGGGTCAGTGCGGCCCAGGCCCGCAGCCGCCGCC | |
| | AAGCCACTGCCTGCTGG | 2930 |
| | CCAGCAGGCAGTGGCTT | 2931 |
| Haemoglobin variant | CCGCACTGACCCTCTTCTCTGCACAGCTCCTAAGCCACTGCC | 2932 |
| Ala111Val | TGCTGGTGACCCTGGCCGCCCACCTCCCCGCCGAGTTCACC | |
| GCC-GTC | CCTGCGGTGCACGCCTCCCTGGACAAGTTCCTGGCTTC | |
| | GAAGCCAGGAACTTGTCCAGGGAGGCGTGCACCGCAGGGGT | 2933 |
| | GAACTCGGCGGGGAGGTGGGCGGCCAGGGTCACCAGCAGG | |
| | CAGTGGCTTAGGAGCTGTGCAGAGAAGAGGGTCAGTGCGG | |
| | CCTGGCCGCCCACCTCC | 2934 |
| | GGAGGTGGGCGGCCAGG | 2935 |
| Haemoglobin variant | TCCTAAGCCACTGCCTGCTGGTGACCCTGGCCGCCCACCTC | 2936 |
| Ala120Glu | CCCGCCGAGTTCACCCCTGCGGTGCACGCCTCCCTGGACAA | |
| GCG-GAG | GTTCCTGGCTTCTGTGAGCACCGTGCTGACCTCCAAATA | |
| | TATTTGGAGGTCAGCACGGTGCTCACAGAAGCCAGGAACTTG | 2937 |
| | TCCAGGGAGGCGTGCACCGCAGGGGTGAACTCGGCGGGGA | |
| | GGTGGGCGGCCAGGGTCACCAGCAGGCAGTGGCTTAGGA | |
| | CACCCCTGCGGTGCACG | 2938 |
| | CGTGCACCGCAGGGGTG | 2939 |
| Haemoglobin variant | CCACTGCCTGCTGGTGACCCTGGCCGCCCACCTCCCCGCCG | 2940 |
| His122Gln | AGTTCACCCCTGCGGTGCACGCCTCCCTGGACAAGTTCCTG | |
| CACg-CAG | GCTTCTGTGAGCACCGTGCTGACCTCCAAATACCGTTAA | |
| | TTAACGGTATTTGGAGGTCAGCACGGTGCTCACAGAAGCCAG | 2941 |
| | GAACTTGTCCAGGGAGGCGTGCACCGCAGGGGTGAACTCGG | |
| | CGGGGAGGTGGGCGGCCAGGGTCACCAGCAGGCAGTGG | |
| | GCGGTGCACGCCTCCCT | 2942 |
| | AGGGAGGCGTGCACCGC | 2943 |
| Haemoglobin variant | CACTGCCTGCTGGTGACCCTGGCCGCCCACCTCCCCGCCGA | 2944 |
| Ala123Ser | GTTCACCCCTGCGGTGCACGCCTCCCTGGACAAGTTCCTGG | |
| cGCC-TCC | CTTCTGTGAGCACCGTGCTGACCTCCAAATACCGTTAAG | |
| | CTTAACGGTATTTGGAGGTCAGCACGGTGCTCACAGAAGCCA | 2945 |
| | GGAACTTGTCCAGGGAGGCGTGCACCGCAGGGGTGAACTCG | |
| | GCGGGGAGGTGGGCGGCCAGGGTCACCAGCAGGCAGTG | |
| | CGGTGCACGCCTCCCTG | 2946 |
| | CAGGGAGGCGTGCACCG | 2947 |
| Thalassaemia alpha | TGCTGGTGACCCTGGCCGCCCACCTCCCCGCCGAGTTCACC | 2948 |
| Leu125Pro | CCTGCGGTGCACGCCTCCCTGGACAAGTTCCTGGCTTCTGTG | |
| CTG-CCG | AGCACCGTGCTGACCTCCAAATACCGTTAAGCTGGAGC | |
| | GCTCCAGCTTAACGGTATTTGGAGGTCAGCACGGTGCTCACA | 2949 |
| | GAAGCCAGGAACTTGTCCAGGGAGGCGTGCACCGCAGGGGT | |
| | GAACTCGGCGGGGAGGTGGGCGGCCAGGGTCACCAGCA | |
| | CGCCTCCCTGGACAAGT | 2950 |
| | ACTTGTCCAGGGAGGCG | 2951 |
| Haemoglobin variant | GCCCACCTCCCCGCCGAGTTCACCCCTGCGGTGCACGCCTC | 2952 |
| Ser131Pro | CCTGGACAAGTTCCTGGCTTCTGTGAGCACCGTGCTGACCTC | |
| tTCT-CCT | CAAATACCGTTAAGCTGGAGCCTCGGTAGCCGTTCCTC | |
| | GAGGAACGGCTACCGAGGCTCCAGCTTAACGGTATTTGGAG | 2953 |
| | GTCAGCACGGTGCTCACAGAAGCCAGGAACTTGTCCAGGGA | |
| | GGCGTGCACCGCAGGGGTGAACTCGGCGGGGAGGTGGGC | |
| | TCCTGGCTTCTGTGAGC | 2954 |
| | GCTCACAGAAGCCAGGA | 2955 |
| Haemoglobin variant | GAGTTCACCCCTGCGGTGCACGCCTCCCTGGACAAGTTCCT | 2956 |
| Leu136Met | GGCTTCTGTGAGCACCGTGCTGACCTCCAAATACCGTTAAGC | |
| gCTG-ATG | TGGAGCCTCGGTAGCCGTTCCTCCTGCCCGCTGGGCCT | |
| | AGGCCCAGCGGGCAGGAGGAACGGCTACCGAGGCTCCAGC | 2957 |
| | TTAACGGTATTTGGAGGTCAGCACGGTGCTCACAGAAGCCAG | |
| | GAACTTGTCCAGGGAGGCGTGCACCGCAGGGGTGAACTC | |
| | GCACCGTGCTGACCTCC | 2958 |
| | GGAGGTCAGCACGGTGC | 2959 |
| Haemoglobin variant | AGTTCACCCCTGCGGTGCACGCCTCCCTGGACAAGTTCCTG | 2960 |
| Leu136Pro | GCTTCTGTGAGCACCGTGCTGACCTCCAAATACCGTTAAGCT | |
| CTG-CCG | GGAGCCTCGGTAGCCGTTCCTCCTGCCCGCTGGGCCTC | |
| | GAGGCCCAGCGGGCAGGAGGAACGGCTACCGAGGCTCCAG | 2961 |
| | CTTAACGGTATTTGGAGGTCAGCACGGTGCTCACAGAAGCCA | |
| | GGAACTTGTCCAGGGAGGCGTGCACCGCAGGGGTGAACT | |
| | CACCGTGCTGACCTCCA | 2962 |
| | TGGAGGTCAGCACGGTG | 2963 |
| Haemoglobin variant | GTGCACGCCTCCCTGGACAAGTTCCTGGCTTCTGTGAGCACC | 2964 |
| Arg141Cys | GTGCTGACCTCCAAATACCGTTAAGCTGGAGCCTCGGTAGCC | |
| cCGT-TGT | GTTCCTCCTGCCCGCTGGGCCTCCCAACGGGCCCTCC | |
| | GGAGGGCCCGTTGGGAGGCCCAGCGGGCAGGAGGAACGGC | 2965 |
| | TACCGAGGCTCCAGCTTAACGGTATTTGGAGGTCAGCACGGT | |
| | GCTCACAGAAGCCAGGAACTTGTCCAGGGAGGCGTGCAC | |
| | CCAAATACCGTTAAGCT | 2966 |
| | AGCTTAACGGTATTTGG | 2967 |
| Haemoglobin variant | CACGCCTCCCTGGACAAGTTCCTGGCTTCTGTGAGCACCGTG | 2968 |
| Term142Gln | CTGACCTCCAAATACCGTTAAGCTGGAGCCTCGGTAGCCGTT | |
| tTAA-CAA | CCTCCTGCCCGCTGGGCCTCCCAACGGGCCCTCCTCC | |
| | GGAGGAGGGCCCGTTGGGAGGCCCAGCGGGCAGGAGGAAC | 2969 |
| | GGCTACCGAGGCTCCAGCTTAACGGTATTTGGAGGTCAGCA | |
| | CGGTGCTCACAGAAGCCAGGAACTTGTCCAGGGAGGCGTG | |
| | AATACCGTTAAGCTGGA | 2970 |
| | TCCAGCTTAACGGTATT | 2971 |
| Haemoglobin variant | CACGCCTCCCTGGACAAGTTCCTGGCTTCTGTGAGCACCGTG | 2972 |
| Term142Lys | CTGACCTCCAAATACCGTTAAGCTGGAGCCTCGGTAGCCGTT | |
| tTAA-AAA | CCTCCTGCCCGCTGGGCCTCCCAACGGGCCCTCCTCC | |
| | GGAGGAGGGCCCGTTGGGAGGCCCAGCGGGCAGGAGGAAC | 2973 |
| | GGCTACCGAGGCTCCAGCTTAACGGTATTTGGAGGTCAGCA | |
| | CGGTGCTCACAGAAGCCAGGAACTTGTCCAGGGAGGCGTG | |
| | AATACCGTTAAGCTGGA | 2974 |
| | TCCAGCTTAACGGTATT | 2975 |
| Haemoglobin variant | CGCCTCCCTGGACAAGTTCCTGGCTTCTGTGAGCACCGTGCT | 2976 |
| Term142Tyr | GACCTCCAAATACCGTTAAGCTGGAGCCTCGGTAGCCGTTCC | |
| TAAg-TAT | TCCTGCCCGCTGGGCCTCCCAACGGGCCCTCCTCCCC | |
| | GGGGAGGAGGGCCCGTTGGGAGGCCCAGCGGGCAGGAGGA | 2977 |
| | ACGGCTACCGAGGCTCCAGCTTAACGGTATTTGGAGGTCAGC | |
| | ACGGTGCTCACAGAAGCCAGGAACTTGTCCAGGGAGGCG | |
| | TACCGTTAAGCTGGAGC | 2978 |
| | GCTCCAGCTTAACGGTA | 2979 |

### EXAMPLE 18

### Human Mismatch Repair—MLH1

[0233] The human MLH1 gene is homologous to the bacterial mutL gene, which is involved in mismatch repair. Mutations in the MLH1 gene have been identified in many individuals with hereditary nonpolyposis colorectal cancer (HNPCC). Mutations in the MLH1 gene are also implicated in predisposition to a variety of cancers associated with, for example, Muir-Torre syndrome and Turcot syndrome. The attached table discloses the correcting oligonucleotide base sequences for the MLH1 oligonucleotides of the invention.

TABLE 20
MLH1 Mutations and Genome-Correcting Oligos

| Clinical Phenotype & | | SEQ ID |
|---|---|---|
| Mutation | Correcting Oligos | NO: |
| Non-polyposis | TTGGCTGAAGGCACTTCCGTTGAGCATCTAGACGTTTCCTTG | 2980 |
| colorectal cancer | GCTCTTCTGGCGCCAAAATGTCGTTCGTGGCAGGGGTTATTC | |
| Met1Arg | GGCGGCTGGACGAGACAGTGGTGAACCGCATCGCGGC | |
| ATG-AGG | GCCGCGATGCGGTTCACCACTGTCTCGTCCAGCCGCCGAAT | 2981 |
| | AACCCCTGCCACGAACGACATTTTGGCGCCAGAAGAGCCAA | |
| | GGAAACGTCTAGATGCTCAACGGAAGTGCCTTCAGCCAA | |
| | CGCCAAAATGTCGTTCG | 2982 |
| | CGAACGACATTTTGGCG | 2983 |
| Non-polyposis | TTGGCTGAAGGCACTTCCGTTGAGCATCTAGACGTTTCCTTG | 2984 |
| colorectal cancer | GCTCTTCTGGCGCCAAAATGTCGTTCGTGGCAGGGGTTATTC | |
| Met1Lys | GGCGGCTGGACGAGACAGTGGTGAACCGCATCGCGGC | |
| ATG-AAG | GCCGCGATGCGGTTCACCACTGTCTCGTCCAGCCGCCGAAT | 2985 |
| | AACCCCTGCCACGAACGACATTTTGGCGCCAGAAGAGCCAA | |
| | GGAAACGTCTAGATGCTCAACGGAAGTGCCTTCAGCCAA | |
| | CGCCAAAATGTCGTTCG | 2986 |
| | CGAACGACATTTTGGCG | 2987 |
| Non-polyposis | TGGTGAACCGCATCGCGGCGGGGGAAGTTATCCAGCGGCCA | 2988 |
| colorectal cancer | GCTAATGCTATCAAAGAGATGATTGAGAACTGGTACGGAGGG | |
| Met35Arg | AGTCGAGCCGGGCTCACTTAAGGGCTACGACTTAACGG | |
| ATG-AGG | CCGTTAAGTCGTAGCCCTTAAGTGAGCCCGGCTCGACTCCCT | 2989 |
| | CCGTACCAGTTCTCAATCATCTCTTTGATAGCATTAGCTGGCC | |
| | GCTGGATAACTTCCCCCGCCGCGATGCGGTTCACCA | |
| | CAAAGAGATGATTGAGA | 2990 |
| | TCTCAATCATCTCTTTG | 2991 |
| Non-polyposis | TAGAGTAGTTGCAGACTGATAAATTATTTTCTGTTTGATTTGCC | 2992 |
| colorectal cancer | AGTTTAGATGCAAAATCCACAAGTATTCAAGTGATTGTTAAAG | |
| Ser44Phe | AGGGAGGCCTGAAGTTGATTCAGATCCAAGACAA | |
| TCC-TTC | TTGTCTTGGATCTGAATCAACTTCAGGCCTCCCTCTTTAACAA | 2993 |
| | TCACTTGAATACTTGTGGATTTTGCATCTAAACTGGCAAATCA | |
| | AACAGAAAATAATTTATCAGTCTGCAACTACTCTA | |
| | TGCAAAATCCACAAGTA | 2994 |
| | TACTTGTGGATTTTGCA | 2995 |
| Non-polyposis | GCAAAATCCACAAGTATTCAAGTGATTGTTAAAGAGGGAGGC | 2996 |
| colorectal cancer | CTGAAGTTGATTCAGATCCAAGACAATGGCACCGGGATCAGG | |
| Gln62Lys | GTAAGTAAAACCTCAAAGTAGCAGGATGTTTGTGCGC | |
| CAA-AAA | GCGCACAAACATCCTGCTACTTTGAGGTTTTACTTACCCTGAT | 2997 |
| | CCCGGTGCCATTGTCTTGGATCTGAATCAACTTCAGGCCTCC | |
| | CTCTTTAACAATCACTTGAATACTTGTGGATTTTGC | |
| | TTCAGATCCAAGACAAT | 2998 |
| | ATTGTCTTGGATCTGAA | 2999 |
| Non-polyposis | GCAAAATCCACAAGTATTCAAGTGATTGTTAAAGAGGGAGGC | 3000 |
| colorectal cancer | CTGAAGTTGATTCAGATCCAAGACAATGGCACCGGGATCAGG | |
| Gln62Term | GTAAGTAAAACCTCAAAGTAGCAGGATGTTTGTGCGC | |
| CAA-TAA | GCGCACAAACATCCTGCTACTTTGAGGTTTTACTTACCCTGAT | 3001 |
| | CCCGGTGCCATTGTCTTGGATCTGAATCAACTTCAGGCCTCC | |
| | CTCTTTAACAATCACTTGAATACTTGTGGATTTTGC | |
| | TTCAGATCCAAGACAAT | 3002 |
| | ATTGTCTTGGATCTGAA | 3003 |
| Non-polyposis | CCACAAGTATTCAAGTGATTGTTAAAGAGGGAGGCCTGAAGT | 3004 |
| colorectal cancer | TGATTCAGATCCAAGACAATGGCACCGGGATCAGGGTAAGTA | |
| Asn64Ser | AAACCTCAAAGTAGCAGGATGTTTGTGCGCTTCATGG | |
| AAT-AGT | CCATGAAGCGCACAAACATCCTGCTACTTTGAGGTTTTACTTA | 3005 |
| | CCCTGATCCCGGTGCCATTGTCTTGGATCTGAATCAACTTCA | |
| | GGCCTCCCTCTTTAACAATCACTTGAATACTTGTGG | |
| | CCAAGACAATGGCACCG | 3006 |
| | CGGTGCCATTGTCTTGG | 3007 |
| Non-polyposis | ATTCAAGTGATTGTTAAAGAGGGAGGCCTGAAGTTGATTCAG | 3008 |
| colorectal cancer | ATCCAAGACAATGGCACCGGGATCAGGGTAAGTAAAACCTCA | |
| Gly67Arg | AAGTAGCAGGATGTTTGTGCGCTTCATGGAAGAGTCA | |
| GGG-AGG | TGACTCTTCCATGAAGCGCACAAACATCCTGCTACTTTGAGGT | 3009 |
| | TTTACTTACCCTGATCCCGGTGCCATTGTCTTGGATCTGAATC | |
| | AACTTCAGGCCTCCCTCTTTAACAATCACTTGAAT | |
| | ATGGCACCGGGATCAGG | 3010 |
| | CCTGATCCCGGTGCCAT | 3011 |
| Non-polyposis | ATTCAAGTGATTGTTAAAGAGGGAGGCCTGAAGTTGATTCAG | 3012 |
| colorectal cancer | ATCCAAGACAATGGCACCGGGATCAGGGTAAGTAAAACCTCA | |
| Gly67Arg | AAGTAGCAGGATGTTTGTGCGCTTCATGGAAGAGTCA | |
| GGG-CGG | TGACTCTTCCATGAAGCGCACAAACATCCTGCTACTTTGAGGT | 3013 |
| | TTTACTTACCCTGATCCCGGTGCCATTGTCTTGGATCTGAATC | |
| | AACTTCAGGCCTCCCTCTTTAACAATCACTTGAAT | |
| | ATGGCACCGGGATCAGG | 3014 |
| | CCTGATCCCGGTGCCAT | 3015 |
| Non-polyposis | ATTCAAGTGATTGTTAAAGAGGGAGGCCTGAAGTTGATTCAG | 3016 |
| colorectal cancer | ATCCAAGACAATGGCACCGGGATCAGGGTAAGTAAAACCTCA | |
| Gly67Trp | AAGTAGCAGGATGTTTGTGCGCTTCATGGAAGAGTCA | |
| GGG-TGG | TGACTCTTCCATGAAGCGCACAAACATCCTGCTACTTTGAGGT | 3017 |
| | TTTACTTACCCTGATCCCGGTGCCATTGTCTTGGATCTGAATC | |
| | AACTTCAGGCCTCCCTCTTTAACAATCACTTGAAT | |
| | ATGGCACCGGGATCAGG | 3018 |
| | CCTGATCCCGGTGCCAT | 3019 |
| Non-polyposis | GTAACATGATTATTTACTCATCTTTTTGGTATCTAACAGAAAGA | 3020 |
| colorectal cancer | AGATCTGGATATTGTATGTGAAAGGTTCACTACTAGTAAACTG | |
| Cys77Arg | CAGTCCTTTGAGGATTTAGCCAGTATTTCTACCT | |
| TGT-CGT | AGGTAGAAATACTGGCTAAATCCTCAAAGGACTGCAGTTTACT | 3021 |
| | AGTAGTGAACCTTTCACATACAATATCCAGATCTTCTTTCTGTT | |
| | AGATACCAAAAAGATGAGTAAATAATCATGTTAC | |
| | ATATTGTATGTGAAAGG | 3022 |
| | CCTTTCACATACAATAT | 3023 |
| Non-polyposis | TAACATGATTATTTACTCATCTTTTTGGTATCTAACAGAAAGAA | 3024 |
| colorectal cancer | GATCTGGATATTGTATGTGAAAGGTTCACTACTAGTAAACTGC | |
| Cys77Tyr | AGTCCTTTGAGGATTTAGCCAGTATTTCTACCTA | |
| TGT-TAT | TAGGTAGAAATACTGGCTAAATCCTCAAAGGACTGCAGTTTAC | 3025 |
| | TAGTAGTGAACCTTTCACATACAATATCCAGATCTTCTTTCTGT | |
| | TAGATACCAAAAAGATGAGTAAATAATCATGTTA | |
| | TATTGTATGTGAAAGGT | 3026 |
| | ACCTTTCACATACAATA | 3027 |
| Non-polyposis | CTGGATATTGTATGTGAAAGGTTCACTACTAGTAAACTGCAGT | 3028 |
| colorectal cancer | CCTTTGAGGATTTAGCCAGTATTTCTACCTATGGCTTTCGAGG | |
| Ser93Gly | TGAGGTAAGCTAAAGATTCAAGAAATGTGTAAAAT | |
| AGT-GGT | ATTTTACACATTTCTTGAATCTTTAGCTTACCTCACCTCGAAAG | 3029 |
| | CCATAGGTAGAAATACTGGCTAAATCCTCAAAGGACTGCAGT | |
| | TTACTAGTAGTGAACCTTTCACATACAATATCCAG | |
| | ATTTAGCCAGTATTTCT | 3030 |
| | AGAAATACTGGCTAAAT | 3031 |
| Non-polyposis | TTCACTACTAGTAAACTGCAGTCCTTTGAGGATTTAGCCAGTA | 3032 |
| colorectal cancer | TTTCTACCTATGGCTTTCGAGGTGAGGTAAGCTAAAGATTCAA | |
| Arg100Term | GAAATGTGTAAAATATCCTCCTGTGATGACATTGT | |
| CGA-TGA | ACAATGTCATCACAGGAGGATATTTTACACATTTCTTGAATCTT | 3033 |
| | TAGCTTACCTCACCTCGAAAGCCATAGGTAGAAATACTGGCT | |
| | AAATCCTCAAAGGACTGCAGTTTACTAGTAGTGAA | |
| | ATGGCTTTCGAGGTGAG | 3034 |
| | CTCACCTCGAAAGCCAT | 3035 |
| Non-polyposis | ACCCAGCAGTGAGTTTTTCTTTCAGTCTATTTTCTTTTCTTCCT | 3036 |
| colorectal cancer | TAGGCTTTGGCCAGCATAAGCCATGTGGCTCATGTTACTATTA | |
| Ile107Arg | CAACGAAAACAGCTGATGGAAAGTGTGCATACAG | |
| ATA-AGA | CTGTATGCACACTTTCCATCAGCTGTTTTCGTTGTAATAGTAA | 3037 |
| | CATGAGCCACATGGCTTATGCTGGCCAAAGCCTAAGGAAGAA | |
| | AAGAAAATAGACTGAAAGAAAAACTCACTGCTGGGT | |
| | GGCCAGCATAAGCCATG | 3038 |
| | CATGGCTTATGCTGGCC | 3039 |
| Non-polyposis | TTTCTTTTCTTCCTTAGGCTTTGGCCAGCATAAGCCATGTGGC | 3040 |
| colorectal cancer | TCATGTTACTATTACAACGAAAACAGCTGATGGAAAGTGTGCA | |
| Thr117Arg | TACAGGTATAGTGCTGACTTCTTTTACTCATATAT | |
| ACG-AGG | ATATATGAGTAAAAGAAGTCAGCACTATACCTGTATGCACACT | 3041 |
| | TTCCATCAGCTGTTTTCGTTGTAATAGTAACATGAGCCACATG | |
| | GCTTATGCTGGCCAAAGCCTAAGGAAGAAAAGAAA | |
| | TATTACAACGAAAACAG | 3042 |
| | CTGTTTTCGTTGTAATA | 3043 |
| Non-polyposis | TTTCTTTTCTTCCTTAGGCTTTGGCCAGCATAAGCCATGTGGC | 3044 |
| colorectal cancer | TCATGTTACTATTACAACGAAAACAGCTGATGGAAAGTGTGCA | |
| Thr117Met | TACAGGTATAGTGCTGACTTCTTTTACTCATATAT | |
| ACG-ATG | ATATATGAGTAAAAGAAGTCAGCACTATACCTGTATGCACACT | 3045 |
| | TTCCATCAGCTGTTTTCGTTGTAATAGTAACATGAGCCACATG | |
| | GCTTATGCTGGCCAAAGCCTAAGGAAGAAAAGAAA | |
| | TATTACAACGAAAACAG | 3046 |
| | CTGTTTTCGTTGTAATA | 3047 |
| Non-polyposis | TCTATCTCTCTACTGGATATTAATTTGTTATATTTTCTCATTAGA | 3048 |
| colorectal cancer | GCAAGTTACTCAGATGGAAAACTGAAAGCCCCTCCTAAACCA | |
| Gly133Term | TGTGCTGGCAATCAAGGGACCCAGATCACGGTAA | |
| GGA-TGA | TTACCGTGATCTGGGTCCCTTGATTGCCAGCACATGGTTTAG | 3049 |
| | GAGGGGCTTTCAGTTTTCCATCTGAGTAACTTGCTCTAATGAG | |
| | AAAATATAACAAATTAATATCCAGTAGAGAGATAGA | |
| | ACTCAGATGGAAAACTG | 3050 |
| | CAGTTTTCCATCTGAGT | 3051 |
| Non-polyposis | TAGTGTGTGTTTTTGGCAACTCTTTTCTTACTCTTTTGTTTTTC | 3052 |
| colorectal cancer | TTTTCCAGGTATTCAGTACACAATGCAGGCATTAGTTTCTCAG | |
| Val185Gly | TTAAAAAAGTAAGTTCTTGGTTTATGGGGGATGG | |
| GTA-GGA | CCATCCCCCATAAACCAAGAACTTACTTTTTTAACTGAGAAAC | 3053 |
| | TAATGCCTGCATTGTGTACTGAATACCTGGAAAAGAAAAACAA | |
| | AAGAGTAAGAAAAGAGTTGCCAAAAACACACACTA | |
| | GTATTCAGTACACAATG | 3054 |
| | CATTGTGTACTGAATAC | 3055 |
| Non-polyposis | TTTCTTACTCTTTTGTTTTTCTTTTCCAGGTATTCAGTACACAA | 3056 |
| colorectal cancer | TGCAGGCATTAGTTTCTCAGTTAAAAAAGTAAGTTCTTGGTTT | |
| Ser193Pro | ATGGGGGATGGTTTTGTTTTATGAAAAGAAAAAA | |
| TCA-CCA | TTTTTTCTTTTCATAAAACAAAACCATCCCCCATAAACCAAGAA | 3057 |
| | CTTACTTTTTTAACTGAGAAACTAATGCCTGCATTGTGTACTG | |
| | AATACCTGGAAAAGAAAAACAAAAGAGTAAGAAA | |
| | TTAGTTTCTCAGTTAAA | 3058 |
| | TTTAACTGAGAAACTAA | 3059 |
| Non-polyposis | TTTGTTTATCAGCAAGGAGAGACAGTAGCTGATGTTAGGACA | 3060 |
| colorectal cancer | CTACCCAATGCCTCAACCGTGGACAATATTCGCTCCATCTTTG | |
| Val213Met | GAAATGCTGTTAGTCGGTATGTCGATAACCTATATA | |
| GTG-ATG | TATATAGGTTATCGACATACCGACTAACAGCATTTCCAAAGAT | 3061 |
| | GGAGCGAATATTGTCCACGGTTGAGGCATTGGGTAGTGTCCT | |
| | AACATCAGCTACTGTCTCTCCTTGCTGATAAACAAA | |
| | CCTCAACCGTGGACAAT | 3062 |
| | ATTGTCCACGGTTGAGG | 3063 |
| Non-polyposis | CAAGGAGAGACAGTAGCTGATGTTAGGACACTACCCAATGCC | 3064 |
| colorectal cancer | TCAACCGTGGACAATATTCGCTCCATCTTTGGAAATGCTGTTA | |
| Arg217Cys | GTCGGTATGTCGATAACCTATATAAAAAAATCTTTT | |
| CGC-TGC | AAAAGATTTTTTTATATAGGTTATCGACATACCGACTAACAGC | 3065 |
| | ATTTCCAAAGATGGAGCGAATATTGTCCACGGTTGAGGCATT | |
| | GGGTAGTGTCCTAACATCAGCTACTGTCTCTCCTTG | |
| | ACAATATTCGCTCCATC | 3066 |
| | GATGGAGCGAATATTGT | 3067 |
| Non-polyposis | GAGACAGTAGCTGATGTTAGGACACTACCCAATGCCTCAACC | 3068 |
| colorectal cancer | GTGGACAATATTCGCTCCATCTTTGGAAATGCTGTTAGTCGGT | |
| Ile219Val | ATGTCGATAACCTATATAAAAAAATCTTTTACATTT | |
| ATC-GTC | AAATGTAAAAGATTTTTTTATATAGGTTATCGACATACCGACTA | 3069 |
| | ACAGCATTTCCAAAGATGGAGCGAATATTGTCCACGGTTGAG | |
| | GCATTGGGTAGTGTCCTAACATCAGCTACTGTCTC | |
| | TTCGCTCCATCTTTGGA | 3070 |
| | TCCAAAGATGGAGCGAA | 3071 |
| Non-polyposis | CTAATAGAGAACTGATAGAAATTGGATGTGAGGATAAAACCCT | 3072 |
| colorectal cancer | AGCCTTCAAAATGAATGGTTACATATCCAATGCAAACTACTCA | |
| Gly244Asp | GTGAAGAAGTGCATCTTCTTACTCTTCATCAACCG | |
| GGT-GAT | CGGTTGATGAAGAGTAAGAAGATGCACTTCTTCACTGAGTAG | 3073 |
| | TTTGCATTGGATATGTAACCATTCATTTTGAAGGCTAGGGTTT | |
| | TATCCTCACATCCAATTTCTATCAGTTCTCTATTAG | |
| | AATGAATGGTTACATAT | 3074 |
| | ATATGTAACCATTCATT | 3075 |
| Non-polyposis | GATGTGAGGATAAAACCCTAGCCTTCAAAATGAATGGTTACAT | 3076 |
| colorectal cancer | ATCCAATGCAAACTACTCAGTGAAGAAGTGCATCTTCTTACTC | |
| Ser252Term | TTCATCAACCGTAAGTTAAAAAGAACCACATGGGA | |
| TCA-TAA | TCCCATGTGGTTCTTTTTAACTTACGGTTGATGAAGAGTAAGA | 3077 |
| | AGATGCACTTCTTCACTGAGTAGTTTGCATTGGATATGTAACC | |
| | ATTCATTTTGAAGGCTAGGGTTTTATCCTCACATC | |
| | AAACTACTCAGTGAAGA | 3078 |
| | TCTTCACTGAGTAGTTT | 3079 |
| Non-polyposis | CACCCCTCAGGACAGTTTTGAACTGGTTGCTTTCTTTTTATTG | 3080 |
| colorectal cancer | TTTAGATCGTCTGGTAGAATCAACTTCCTTGAGAAAAGCCATA | |
| Glu268Gly | GAAACAGTGTATGCAGCCTATTTGCCCAAAAACAC | |
| GAA-GGA | GTGTTTTTGGGCAAATAGGCTGCATACACTGTTTCTATGGCTT | 3081 |
| | TTCTCAAGGAAGTTGATTCTACCAGACGATCTAAACAATAAAA | |
| | AGAAAGCAACCAGTTCAAAACTGTCCTGAGGGGTG | |
| | TCTGGTAGAATCAACTT | 3082 |
| | AAGTTGATTCTACCAGA | 3083 |
| Non-polyposis | CCCTCAGGACAGTTTTGAACTGGTTGCTTTCTTTTTATTGTTTA | 3084 |
| colorectal cancer | GATCGTCTGGTAGAATCAACTTCCTTGAGAAAAGCCATAGAAA | |
| Ser269Term | CAGTGTATGCAGCCTATTTGCCCAAAAACACACA | |
| TCA-TGA | TGTGTGTTTTTGGGCAAATAGGCTGCATACACTGTTTCTATGG | 3085 |
| | CTTTTCTCAAGGAAGTTGATTCTACCAGACGATCTAAACAATA | |
| | AAAAGAAAGCAACCAGTTCAAAACTGTCCTGAGGG | |
| | GGTAGAATCAACTTCCT | 3086 |
| | AGGAAGTTGATTCTACC | 3087 |
| Non-polyposis | CTTTTTCTCCCCCTCCCACTATCTAAGGTAATTGTTCTCTCTTA | 3088 |
| colorectal cancer | TTTTCCTGACAGTTTAGAAATCAGTCCCCAGAATGTGGATGTT | |
| Glu297Term | AATGTGCACCCCACAAAGCATGAAGTTCACTTCC | |
| GAA-TAA | GGAAGTGAACTTCATGCTTTGTGGGGTGCACATTAACATCCA | 3089 |
| | CATTCTGGGGACTGATTTCTAAACTGTCAGGAAAATAAGAGA | |
| | GAACAATTACCTTAGATAGTGGGAGGGGGAGAAAAAG | |
| | ACAGTTTAGAAATCAGT | 3090 |
| | ACTGATTTCTAAACTGT | 3091 |
| Non-polyposis | CTCCCACTATCTAAGGTAATTGTTCTCTCTTATTTTCCTGACAG | 3092 |
| colorectal cancer | TTTAGAAATCAGTCCCCAGAATGTGGATGTTAATGTGCACCCC | |
| Gln301Term | ACAAAGCATGAAGTTCACTTCCTGCACGAGGAGA | |
| CAG-TAG | TCTCCTCGTGCAGGAAGTGAACTTCATGCTTTGTGGGGTGCA | 3093 |
| | CATTAACATCCACATTCTGGGGACTGATTTCTAAACTGTCAGG | |
| | AAAATAAGAGAGAACAATTACCTTAGATAGTGGGAG | |
| | TCAGTCCCCAGAATGTG | 3094 |
| | CACATTCTGGGGACTGA | 3095 |
| Non-polyposis | ATGTGCACCCCACAAAGCATGAAGTTCACTTCCTGCACGAGG | 3096 |
| colorectal cancer | AGAGCATCCTGGAGCGGGTGCAGCAGCACATCGAGAGCAAG | |
| Val326Ala | CTCCTGGGCTCCAATTCCTCCAGGATGTACTTCACCCA | |
| GTG-GCG | TGGGTGAAGTACATCCTGGAGGAATTGGAGCCCAGGAGCTT | 3097 |
| | GCTCTCGATGTGCTGCTGCACCCGCTCCAGGATGCTCTCCTC | |
| | GTGCAGGAAGTGAACTTCATGCTTTGTGGGGTGCACAT | |
| | GGAGCGGGTGCAGCAGC | 3098 |
| | GCTGCTGCACCCGCTCC | 3099 |
| Non-polyposis | CCACAAAGCATGAAGTTCACTTCCTGCACGAGGAGAGCATCC | 3100 |
| colorectal cancer | TGGAGCGGGTGCAGCAGCACATCGAGAGCAAGCTCCTGGGC | |
| His329Pro | TCCAATTCCTCCAGGATGTACTTCACCCAGGTCAGGGC | |
| CAC-CCC | GCCCTGACCTGGGTGAAGTACATCCTGGAGGAATTGGAGCC | 3101 |
| | CAGGAGCTTGCTCTCGATGTGCTGCTGCACCCGCTCCAGGAT | |
| | GCTCTCCTCGTGCAGGAAGTGAACTTCATGCTTTGTGG | |
| | GCAGCAGCACATCGAGA | 3102 |
| | TCTCGATGTGCTGCTGC | 3103 |
| Non-polyposis | CAAGTCTGACCTCGTCTTCTACTTCTGGAAGTAGTGATAAGGT | 3104 |
| colorectal cancer | CTATGCCCACCAGATGGTTCGTACAGATTCCCGGGAACAGAA | |
| Val384Asp | GCTTGATGCATTTCTGCAGCCTCTGAGCAAACCCCT | |
| GTT-GAT | AGGGGTTTGCTCAGAGGCTGCAGAAATGCATCAAGCTTCTGT | 3105 |
| | TCCCGGGAATCTGTACGAACCATCTGGTGGGCATAGACCTTA | |
| | TCACTACTTCCAGAAGTAGAAGACGAGGTCAGACTTG | |
| | CCAGATGGTTCGTACAG | 3106 |
| | CTGTACGAACCATCTGG | 3107 |
| Non-polyposis | AGTGGCAGGGCTAGGCAGCAAGATGAGGAGATGCTTGAACT | 3108 |
| colorectal cancer | CCCAGCCCCTGCTGAAGTGGCTGCCAAAAATCAGAGCTTGGA | |
| Ala441Thr | GGGGGATACAACAAAGGGGACTTCAGAAATGTCAGAGA | |
| GCT-ACT | TCTCTGACATTTCTGAAGTCCCCTTTGTTGTATCCCCCTCCAA | 3109 |
| | GCTCTGATTTTTGGCAGCCACTTCAGCAGGGGCTGGGAGTTC | |
| | AAGCATCTCCTCATCTTGCTGCCTAGCCCTGCCACT | |
| | CTGAAGTGGCTGCCAAA | 3110 |
| | TTTGGCAGCCACTTCAG | 3111 |
| Non-polyposis | CTTCATTGCAGAAAGAGACATCGGGAAGATTCTGATGTGGAA | 3112 |
| colorectal cancer | ATGGTGGAAGATGATTCCCGAAAGGAAATGACTGCAGCTTGT | |
| Arg487Term | ACCCCCCGGAGAAGGATCATTAACCTCACTAGTGTTT | |
| CGA-TGA | AAACACTAGTGAGGTTAATGATCCTTCTCCGGGGGGTACAAG | 3113 |
| | CTGCAGTCATTTCCTTTCGGGAATCATCTTCCACCATTTCCAC | |
| | ATCAGAATCTTCCCGATGTCTCTTTCTGCAATGAAG | |
| | ATGATTCCCGAAAGGAA | 3114 |
| | TTCCTTTCGGGAATCAT | 3115 |
| Non-polyposis | AGACATCGGGTAAGATTCTGATGTGGAAATGGTGGAAGATGAT | 3116 |
| colorectal cancer | TCCCGAAAGGAAATGACTGCAGCTTGTACCCCCCGGAGAAG | |
| Ala492Thr | GATCATTAACCTCACTAGTGTTTTGAGTCTCCAGGAAG | |
| GCA-ACA | CTTCCTGGAGACTCAAAACACTAGTGAGGTTAATGATCCTTCT | 3117 |
| | CCGGGGGGTACAAGCTGCAGTCATTTCCTTTCGGGAATCATC | |
| | TTCCACCATTTCCACATCAGAATCTTCCCGATGTCT | |
| | AAATGACTGCAGCTTGT | 3118 |
| | ACAAGCTGCAGTCATTT | 3119 |
| Non-polyposis | CCCGAAAGGAAATGACTGCAGCTTGTACCCCCCGGAGAAGG | 3120 |
| colorectal cancer | ATCATTAACCTCACTAGTGTTTTGAGTCTCCAGGAAGAAATTA | |
| Val506Ala | ATGAGCAGGGACATGAGGGTACGTAAACGCTGTGGCC | |
| GTT-GCT | GGCCACAGCGTTTACGTACCCTCATGTCCCTGCTCATTAATTT | 3121 |
| | CTTCCTGGAGACTCAAAACACTAGTGAGGTTAATGATCCTTCT | |
| | CCGGGGGGTACAAGCTGCAGTCATTTCCTTTCGGG | |
| | CACTAGTGTTTTGAGTC | 3122 |
| | GACTCAAAACACTAGTG | 3123 |
| Non-polyposis | GGGAGATGTTGCATAACCACTCCTTCGTGGGCTGTGTGAATC | 3124 |
| colorectal cancer | CTCAGTGGGCCTTGGCACAGCATCAAACCAAGTTATACCTTC | |
| Gln542Leu | TCAACACCACCAAGCTTAGGTAAATCAGCTGAGTGTG | |
| CAG-CTG | CACACTCAGCTGATTTACCTAAGCTTGGTGGTGTTGAGAAGG | 3125 |
| | TATAACTTGGTTTGATGCTGTGCCAAGGCCCACTGAGGATTC | |
| | ACACAGCCCACGAAGGAGTGGTTATGCAACATCTCCC | |
| | CTTGGCACAGCATCAAA | 3126 |
| | TTTGATGCTGTGCCAAG | 3127 |
| Non-polyposis | CCTTCGTGGGCTGTGTGAATCCTCAGTGGGCCTTGGCACAG | 3128 |
| colorectal cancer | CATCAAACCAAGTTATACCTTCTCAACACCACCAAGCTTAGGT | |
| Leu549Pro | AAATCAGCTGAGTGTGTGAACAAGCAGAGCTACTACA | |
| CTT-CCT | TGTAGTAGCTCTGCTTGTTCACACACTCAGCTGATTTACCTAA | 3129 |
| | GCTTGGTGGTGTTGAGAAGGTATAACTTGGTTTGATGCTGTG | |
| | CCAAGGCCCACTGAGGATTCACACAGCCCACGAAGG | |
| | GTTATACCTTCTCAACA | 3130 |
| | TGTTGAGAAGGTATAAC | 3131 |
| Non-polyposis | TGGGCTGTGTGAATCCTCAGTGGGCCTTGGCACAGCATCAAA | 3132 |
| colorectal cancer | CCAAGTTATACCTTCTCAACACCACCAAGCTTAGGTAAATCAG | |
| Asn551Thr | CTGAGTGTGTGAACAAGCAGAGCTACTACAACAATG | |
| AAC-ACC | CATTGTTGTAGTAGCTCTGCTTGTTCACACACTCAGCTGATTT | 3133 |
| | ACCTAAGCTTGGTGGTGTTGAGAAGGTATAACTTGGTTTGAT | |
| | GCTGTGCCAAGGCCCACTGAGGATTCACACAGCCCA | |
| | CCTTCTCAACACCACCA | 3134 |
| | TGGTGGTGTTGAGAAGG | 3135 |
| Non-polyposis | ATGAATTCAGCTTTTCCTTAAAGTCACTTCATTTTTATTTTCAG | 3136 |
| colorectal cancer | TGAAGAACTGTTCTACCAGATACTCATTTATGATTTTGCCAATT | |
| Gln562Term | TTGGTGTTCTCAGGTTATCGGTAAGTTTAGATC | |
| CAG-TAG | GATCTAAACTTACCGATAACCTGAGAACACCAAAATTGGCAAA | 3137 |
| | ATCATAAATGAGTATCTGGTAGAACAGTTCTTCACTGAAAATA | |
| | AAAATGAAGTGACTTTAAGGAAAAGCTGAATTCAT | |
| | TGTTCTACCAGATACTC | 3138 |
| | GAGTATCTGGTAGAACA | 3139 |
| Non-polyposis | GCTTTTCCTTAAAGTCACTTCATTTTTATTTTCAGTGAAGAACT | 3140 |
| colorectal cancer | GTTCTACCAGATACTCATTTATGATTTTGCCAATTTTGGTGTTC | |
| Ile565Phe | TCAGGTTATCGGTAAGTTTAGATCCTTTTCACT | |
| ATT-TTT | AGTGAAAAGGATCTAAACTTACCGATAACCTGAGAACACCAAA | 3141 |
| | ATTGGCAAAATCATAAATGAGTATCTGGTAGAACAGTTCTTCA | |
| | CTGAAAATAAAAATGAAGTGACTTTAAGGAAAAGC | |
| | AGATACTCATTTATGAT | 3142 |
| | ATCATAAATGAGTATCT | 3143 |
| Non-polyposis | TTTTCAGTGAAGAACTGTTCTACCAGATACTCATTTATGATTTT | 3144 |
| colorectal cancer | GCCAATTTTGGTGTTCTCAGGTTATCGGTAAGTTTAGATCCTT | |
| Leu574Pro | TTCACTTCTGAAATTTCAACTGATCGTTTCTGAA | |
| CTC-CCC | TTCAGAAACGATCAGTTGAAATTTCAGAAGTGAAAAGGATCTA | 3145 |
| | AACTTACCGATAACCTGAGAACACCAAAATTGGCAAAATCATA | |
| | AATGAGTATCTGGTAGAACAGTTCTTCACTGAAAA | |
| | TGGTGTTCTCAGGTTAT | 3146 |
| | ATAACCTGAGAACACCA | 3147 |
| Non-polyposis | TGGATGCTCCGTTAAAGCTTGCTCCTTCATGTTCTTGCTTCTT | 3148 |
| colorectal cancer | CCTAGGAGCCAGCACCGCTCTTTGACCTTGCCATGCTTGCCT | |
| Leu582Val | TAGATAGTCCAGAGAGTGGCTGGACAGAGGAAGATG | |
| CTC-GTC | CATCTTCCTCTGTCCAGCCACTCTCTGGACTATCTAAGGCAA | 3149 |
| | GCATGGCAAGGTCAAAGAGCGGTGCTGGCTCCTAGGAAGAA | |
| | GCAAGAACATGAAGGAGCAAGCTTTAACGGAGCATCCA | |
| | CAGCACCGCTCTTTGAC | 3150 |
| | GTCAAAGAGCGGTGCTG | 3151 |
| Non-polyposis | TGCTTGCCTTAGATAGTCCAGAGAGTGGCTGGACAGAGGAAG | 3152 |
| colorectal cancer | ATGGTCCCAAAGAAGGACTTGCTGAATACATTGTTGAGTTTCT | |
| Leu607His | GAAGAAGAAGGCTGAGATGCTTGCAGACTATTTCTC | |
| CTT-CAT | GAGAAATAGTCTGCAAGCATCTCAGCCTTCTTCTTCAGAAACT | 3153 |
| | CAACAATGTATTCAGCAAGTCCTTCTTTGGGACCATCTTCCTC | |
| | TGTCCAGCCACTCTCTGGACTATCTAAGGCAAGCA | |
| | AGAAGGACTTGCTGAAT | 3154 |
| | ATTCAGCAAGTCCTTCT | 3155 |
| Non-polyposis | ACAGAGGAAGATGGTCCCAAAGAAGGACTTGCTGAATACATT | 3156 |
| colorectal cancer | GTTGAGTTTCTGAAGAAGAAGGCTGAGATGCTTGCAGACTAT | |
| Lys618Term | TTCTCTTTGGAAATTGATGAGGTGTGACAGCCATTCT | |
| AAG-TAG | AGAATGGCTGTCACACCTCATCAATTTCCAAAGAGAAATAGTC | 3157 |
| | TGCAAGCATCTCAGCCTTCTTCTTCAGAAACTCAACAATGTAT | |
| | TCAGCAAGTCCTTCTTTGGGACCATCTTCCTCTGT | |
| | TGAAGAAGAAGGCTGAG | 3158 |
| | CTCAGCCTACTTCTTCA | 3159 |
| Non-polyposis | CAGAGGAAGATGGTCCCAAAGAAGGACTTGCTGAATACATTG | 3160 |
| colorectal cancer | TTGAGTTTCTGAAGAAGAAGGCTGAGATGCTTGCAGACTATTT | |
| Lys618Thr | CTCTTTGGAAATTGATGAGGTGTGACAGCCATTCTT | |
| AAG-ACG | AAGAATGGCTGTCACACCTCATCAATTTCCAAAGAGAAATAGT | 3161 |
| | CTGCAAGCATCTCAGCCTTCTTCTTCAGAAACTCAACAATGTA | |
| | TTCAGCAAGTCCTTCTTTGGGACCATCTTCCTCTG | |
| | GAAGAAGAAGGCTGAGA | 3162 |
| | TCTCAGCCATCTTCTTC | 3163 |
| Non-polyposis | TACCCCTTCTGATTGACAACTATGTGCCCCCTTTGGAGGGAC | 3164 |
| colorectal cancer | TGCCTATCTTCATTCTTCGACTAGCCACTGAGGTCAGTGATCA | |
| Arg659Leu | AGCAGATACTAAGCATTTCGGTACATGCATGTGTGC | |
| CGA-CTA | GCACACATGCATGTACCGAAATGCTTAGTATCTGCTTGATCAC | 3165 |
| | TGACCTCAGTGGCTAGTCGAAGAATGAAGATAGGCAGTCCCT | |
| | CCAAAGGGGGCACATAGTTGTCAATCAGAAGGGGTA | |
| | CATTCTTCGACTAGCCA | 3166 |
| | TGGCTAGTCGAAGAATG | 3167 |
| Non-polyposis | TACCCCTTCTGATTGACAACTATGTGCCCCCTTTGGAGGGAC | 3168 |
| colorectal cancer | TGCCTATCTTCATTCTTCGACTAGCCACTGAGGTCAGTGATCA | |
| Arg659Pro | AGCAGATACTAAGCATTTCGGTACATGCATGTGTGC | |
| CGA-CCA | GCACACATGCATGTACCGAAATGCTTAGTATCTGCTTGATCAC | 3169 |
| | TGACCTCAGTGGCTAGTCGAAGAATGAAGATAGGCAGTCCCT | |
| | CCAAAGGGGGCACATAGTTGTCAATCAGAAGGGGTA | |
| | CATTCTTCGACTAGCCA | 3170 |
| | TGGCTAGTCGAAGAATG | 3171 |
| Non-polyposis | TTACCCCTTCTGATTGACAACTATGTGCCCCCTTTGGAGGGA | 3172 |
| colorectal cancer | CTGCCTATCTTCATTCTTCGACTAGCCACTGAGGTCAGTGATC | |
| Arg659Term | AAGCAGATACTAAGCATTTCGGTACATGCATGTGTG | |
| CGA-TGA | CACACATGCATGTACCGAAATGCTTAGTATCTGCTTGATCACT | 3173 |
| | GACCTCAGTGGCTAGTCGAAGAATGAAGATAGGCAGTCCCTC | |
| | CAAAGGGGGCACATAGTTGTCAATCAGAAGGGGTAA | |
| | TCATTCTTCGACTAGCC | 3174 |
| | GGCTAGTCGAAGAATGA | 3175 |
| Non-polyposis | TTGGACCAGGTGAATTGGGACGAAGAAAAGGAATGTTTTGAA | 3176 |
| colorectal cancer | AGCCTCAGTAAAGAATGCGCTATGTTCTATTCCATCCGGAAG | |
| Ala681Thr | CAGTACATATCTGAGGAGTCGACCCTCTCAGGCCAGC | |
| GCT-ACT | GCTGGCCTGAGAGGGTCGACTCCTCAGATATGTACTGCTTCC | 3177 |
| | GGATGGAATAGAACATAGCGCATTCTTTACTGAGGCTTTCAAA | |
| | ACATTCCTTTTCTTCGTCCCAATTCACCTGGTCCAA | |
| | AAGAATGCGCTATGTTC | 3178 |
| | GAACATAGCGCATTCTT | 3179 |
| Non-polyposis | AGGCTTATGACATCTAATGTGTTTTCCAGAGTGAAGTGCCTG | 3180 |
| colorectal cancer | GCTCCATTCCAAACTCCTGGAAGTGGACTGTGGAACACATTG | |
| Trp712Term | TCTATAAAGCCTTGCGCTCACACATTCTGCCTCCTAA | |
| TGG-TAG | TTAGGAGGCAGAATGTGTGAGCGCAAGGCTTTATAGACAATG | 3181 |
| | TGTTCCACAGTCCACTTCCAGGAGTTTGGAATGGAGCCAGGC | |
| | ACTTCACTCTGGAAAACACATTAGATGTCATAAGCCT | |
| | AAACTCCTGGAAGTGGA | 3182 |
| | TCCACTTCCAGGAGTTT | 3183 |
| Non-polyposis | ATGACATCTAATGTGTTTTCCAGAGTGAAGTGCCTGGCTCCAT | 3184 |
| colorectal cancer | TCCAAACTCCTGGAAGTGGACTGTGGAACACATTGTCTATAAA | |
| Trp714Term | GCCTTGCGCTCACACATTCTGCCTCCTAAACATTT | |
| TGG-TAG | AAATGTTTAGGAGGCAGAATGTGTGAGCGCAAGGCTTTATAG | 3185 |
| | ACAATGTGTTCCACAGTCCACTTCCAGGAGTTTGGAATGGAG | |
| | CCAGGCACTTCACTCTGGAAAACACATTAGATGTCAT | |
| | CTGGAAGTGGACTGTGG | 3186 |
| | CCACAGTCCACTTCCAG | 3187 |
| Non-polyposis | TGACATCTAATGTGTTTTCCAGAGTGAAGTGCCTGGCTCCATT | 3188 |
| colorectal cancer | CCAAACTCCTGGAAGTGGACTGTGGAACACATTGTCTATAAA | |
| Trp714Term | GCCTTGCGCTCACACATTCTGCCTCCTAAACATTTC | |
| TGG-TGA | GAAATGTTTAGGAGGCAGAATGTGTGAGCGCAAGGCTTTATA | 3189 |
| | GACAATGTGTTCCACAGTCCACTTCCAGGAGTTTGGAATGGA | |
| | GCCAGGCACTTCACTCTGGAAAACACATTAGATGTCA | |
| | TGGAAGTGGACTGTGGA | 3190 |
| | TCCACAGTCCACTTCCA | 3191 |
| Non-polyposis | ATCTAATGTGTTTTCCAGAGTGAAGTGCCTGGCTCCATTCCAA | 3192 |
| colorectal cancer | ACTCCTGGAAGTGGACTGTGGAACACATTGTCTATAAAGCCT | |
| Val716Met | TGCGCTCACACATTCTGCCTCCTAAACATTTCACAG | |
| GTG-ATG | CTGTGAAATGTTTAGGAGGCAGAATGTGTGAGCGCAAGGCTT | 3193 |
| | TATAGACAATGTGTTCCACAGTCCACTTCCAGGAGTTTGGAAT | |
| | GGAGCCAGGCACTTCACTCTGGAAAACACATTAGAT | |
| | AGTGGACTGTGGAACAC | 3194 |
| | GTGTTCCACAGTCCACT | 3195 |
| Non-polyposis | GAGTGAAGTGCCTGGCTCCATTCCAAACTCCTGGAAGTGGAC | 3196 |
| colorectal cancer | TGTGGAACACATTGTCTATAAAGCCTTGCGCTCACACATTCTG | |
| Tyr721Term | CCTCCTAAACATTTCACAGAAGATGGAAATATCCTG | |
| TAT-TAA | CAGGATATTTCCATCTTCTGTGAAATGTTTAGGAGGCAGAATG | 3197 |
| | TGTGAGCGCAAGGCTTTATAGACAATGTGTTCCACAGTCCAC | |
| | TTCCAGGAGTTTGGAATGGAGCCAGGCACTTCACTC | |
| | ATTGTCTATAAAGCCTT | 3198 |
| | AAGGCTTTATAGACAAT | 3199 |
| Non-polyposis | CTAAACATTTCACAGAAGATGGAAATATCCTGCAGCTTGCTAA | 3200 |
| colorectal cancer | CCTGCCTGATCTATACAAAGTCTTTGAGAGGTGTTAAATATGG | |
| Lys751Arg | TTATTTATGCACTGTGGGATGTGTTCTTCTTTCTC | |
| AAA-AGA | GAGAAAGAAGAACACATCCCACAGTGCATAAATAACCATATTT | 3201 |
| | AACACCTCTCAAAGACTTTGTATAGATCAGGCAGGTTAGCAA | |
| | GCTGCAGGATATTTCCATCTTCTGTGAAATGTTTAG | |
| | TCTATACAAAGTCTTTG | 3202 |
| | CAAAGACTTTGTATAGA | 3203 |
| Non-polyposis | ACAGAAGATGGAAATATCCTGCAGCTTGCTAACCTGCCTGAT | 3204 |
| colorectal cancer | CTATACAAAGTCTTTGAGAGGTGTTAAATATGGTTATTTATGC | |
| Arg755Trp | ACTGTGGGATGTGTTCTTCTTTCTCTGTATTCCGAT | |
| AGG-TGG | ATCGGAATACAGAGAAAGAAGAACACATCCCACAGTGCATAA | 3205 |
| | ATAACCATATTTAACACCTCTCAAAGACTTTGTATAGATCAGG | |
| | CAGGTTAGCAAGCTGCAGGATATTTCCATCTTCTGT | |
| | TCTTTGAGAGGTGTTAA | 3206 |
| | TTAACACCTCTCAAAGA | 3207 |

### EXAMPLE 19

### Human Mismatch Repair—MSH2

[0234] The human MSH2 gene is homologous to the bacterial mutS gene, which is involved in mismatch repair. Mutations in the MSH2 gene have been identified in a variety of cancers, including, for example, ovarian tumors, colorectal cancer, endometrial cancer, uterine cancer. The attached table discloses the correcting oligonucleotide base sequences for the MSH2 oligonucleotides of the invention.

TABLE 21
MSH2 Mutations and Genome-Correcting Oligos

| Clinical Phenotype & | | SEQ ID |
|---|---|---|
| Mutation | Correcting Oligos | NO: |
| Non polyposis | TTTTCCACAAAAGACATTTATCAGGACCTCAACCGGTTGTTGA | 3208 |
| colorectal cancer | AAGGCAAAAAGGGAGAGCAGATGAATAGTGCTGTATTGCCAG | |
| Gln252Term | AAATGGAGAATCAGGTACATGGATTATAAATGTGAA | |
| CAG-TAG | TTCACATTTATAATCCATGTACCTGATTCTCCATTTCTGGCAAT | 3209 |
| | ACAGCACTATTCATCTGCTCTCCCTTTTTGCCTTTCAACAACC | |
| | GGTTGAGGTCCTGATAAATGTCTTTTGTGGAAAA | |
| | AGGGAGAGCAGATGAAT | 3210 |
| | ATTCATCTGCTCTCCCT | 3211 |
| Non polyposis | TCATCACTGTCTGCGGTAATCAAGTTTTTAGAACTCTTATCAG | 3212 |
| colorectal cancer | ATGATTCCAACTTTGGACAGTTTGAACTGACTACTTTTGACTT | |
| Gln288Term | CAGCCAGTATATGAAATTGGATATTGCAGCAGTCA | |
| CAG-TAG | TGACTGCTGCAATATCCAATTTCATATACTGGCTGAAGTCAAA | 3213 |
| | AGTAGTCAGTTCAAACTGTCCAAAGTTGGAATCATCTGATAAG | |
| | AGTTCTAAAAACTTGATTACCGCAGACAGTGATGA | |
| | ACTTTGGACAGTTTGAA | 3214 |
| | TTCAAACTGTCCAAAGT | 3215 |
| Non polyposis | AACTTTGGACAGTTTGAACTGACTACTTTTGACTTCAGCCAGT | 3216 |
| colorectal cancer | ATATGAAATTGGATATTGCAGCAGTCAGAGCCCTTAACCTTTT | |
| Ala305Thr | TCAGGTAAAAAAAAAAAAAAAAAAAAAAAAAAAGG | |
| GCA-ACA | CCTTTTTTTTTTTTTTTTTTTTTTTTTTTACCTGAAAAAGGTTAA | 3217 |
| | GGGCTCTGACTGCTGCAATATCCAATTTCATATACTGGCTGAA | |
| | GTCAAAAGTAGTCAGTTCAAACTGTCCAAAGTT | |
| | TGGATATTGCAGCAGTC | 3218 |
| | GACTGCTGCAATATCCA | 3219 |
| Non polyposis | AGCTTGCCATTCTTTCTATTTTATTTTTTGTTTACTAGGGTTCT | 3220 |
| colorectal cancer | GTTGAAGATACCACTGGCTCTCAGTCTCTGGCTGCCTTGCTG | |
| Gly322Asp | AATAAGTGTAAAACCCCTCAAGGACAAAGACTTGT | |
| GGC-GAC | ACAAGTCTTTGTCCTTGAGGGGTTTTACACTTATTCAGCAAGG | 3221 |
| | CAGCCAGAGACTGAGAGCCAGTGGTATCTTCAACAGAACCCT | |
| | AGTAAACAAAAAATAAAATAGAAAGAATGGCAAGCT | |
| | TACCACTGGCTCTCAGT | 3222 |
| | ACTGAGAGCCAGTGGTA | 3223 |
| Non polyposis | TTGCCATTCTTTCTATTTTATTTTTTGTTTACTAGGGTTCTGTT | 3224 |
| colorectal cancer | GAAGATACCACTGGCTCTCAGTCTCTGGCTGCCTTGCTGAAT | |
| Ser323Cys | AAGTGTAAAACCCCTCAAGGACAAAGACTTGTTAA | |
| TCT-TGT | TTAACAAGTCTTTGTCCTTGAGGGGTTTTACACTTATTCAGCA | 3225 |
| | AGGCAGCCAGAGACTGAGAGCCAGTGGTATCTTCAACAGAAC | |
| | CCTAGTAAACAAAAAATAAAATAGAAAGAATGGCAA | |
| | CACTGGCTCTCAGTCTC | 3226 |
| | GAGACTGAGAGCCAGTG | 3227 |
| Non polyposis | GTGGAAGCTTTTGTAGAAGATGCAGAATTGAGGCAGACTTTA | 3228 |
| colorectal cancer | CAAGAAGATTTACTTCGTCGATTCCCAGATCTTAACCGACTTG | |
| Arg383Term | CCAAGAAGTTTCAAAGACAAGCAGCAAACTTACAAG | |
| CGA-TGA | CTTGTAAGTTTGCTGCTTGTCTTTGAAACTTCTTGGCAAGTCG | 3229 |
| | GTTAAGATCTGGGAATCGACGAAGTAAATCTTCTTGTAAAGTC | |
| | TGCCTCAATTCTGCATCTTCTACAAAAGCTTCCAC | |
| | TACTTCGTCGATTCCCA | 3230 |
| | TGGGAATCGACGAAGTA | 3231 |
| Non polyposis | CAAGAAGATTTACTTCGTCGATTCCCAGATCTTAACCGACTTG | 3232 |
| colorectal cancer | CCAAGAAGTTTCAAAGACAAGCAGCAAACTTACAAGATTGTTA | |
| Gln397Term | CCGACTCTATCAGGGTATAAATCAACTACCTAATG | |
| CAA-TAA | CATTAGGTAGTTGATTTATACCCTGATAGAGTCGGTAACAATC | 3233 |
| | TTGTAAGTTTGCTGCTTGTCTTTGAAACTTCTTGGCAAGTCGG | |
| | TTAAGATCTGGGAATCGACGAAGTAAATCTTCTTG | |
| | TTCAAAGACAAGCAGCA | 3234 |
| | TGCTGCTTGTCTTTGAA | 3235 |
| Non polyposis | GATCTTAACCGACTTGCCAAGAAGTTTCAAAGACAAGCAGCA | 3236 |
| colorectal cancer | AACTTACAAGATTGTTACCGACTCTATCAGGGTATAAATCAAC | |
| Arg406Term | TACCTAATGTTATACAGGCTCTGGAAAAACATGAAG | |
| CGA-TGA | CTTCATGTTTTTCCAGAGCCTGTATAACATTAGGTAGTTGATTT | 3237 |
| | ATACCCTGATAGAGTCGGTAACAATCTTGTAAGTTTGCTGCTT | |
| | GTCTTTGAAACTTCTTGGCAAGTCGGTTAAGATC | |
| | ATTGTTACCGACTCTAT | 3238 |
| | ATAGAGTCGGTAACAAT | 3239 |
| Non polyposis | GCAAACTTACAAGATTGTTACCGACTCTATCAGGGTATAAATC | 3240 |
| colorectal cancer | AACTACCTAATGTTATACAGGCTCTGGAAAAACATGAAGGTAA | |
| Gln419Term | CAAGTGATTTTGTTTTTTTGTTTTCCTTCAACTCA | |
| CAG-TAG | TGAGTTGAAGGAAAACAAAAAAACAAAATCACTTGTTACCTTC | 3241 |
| | ATGTTTTTCCAGAGCCTGTATAACATTAGGTAGTTGATTTATAC | |
| | CCTGATAGAGTCGGTAACAATCTTGTAAGTTTGC | |
| | ATGTTATACAGGCTCTG | 3242 |
| | CAGAGCCTGTATAACAT | 3243 |
| Non polyposis | TATTCTGTAAAATGAGATCTTTTTATTTGTTTGTTTTACTACTTT | 3244 |
| colorectal cancer | CTTTTAGGAAAACACCAGAAATTATTGTTGGCAGTTTTTGTGA | |
| Gln429Term | CTCCTCTTACTGATCTTCGTTCTGACTTCTCCA | |
| CAG-TAG | TGGAGAAGTCAGAACGAAGATCAGTAAGAGGAGTCACAAAAA | 3245 |
| | CTGCCAACAATAATTTCTGGTGTTTTCCTAAAAGAAAGTAGTA | |
| | AAACAAACAAATAAAAAGATCTCATTTTACAGAATA | |
| | GAAAACACCAGAAATTA | 3246 |
| | TAATTTCTGGTGTTTTC | 3247 |
| Non polyposis | CTCCTCTTACTGATCTTCGTTCTGACTTCTCCAAGTTTCAGGA | 3248 |
| colorectal cancer | AATGATAGAAACAACTTTAGATATGGATCAGGTATGCAATATA | |
| Leu458Term | CTTTTTAATTTAAGCAGTAGTTATTTTTAAAAAGC | |
| TTA-TGA | GCTTTTTAAAAATAACTACTGCTTAAATTAAAAAGTATATTGCA | 3249 |
| | TACCTGATCCATATCTAAAGTTGTTTCTATCATTTCCTGAAACT | |
| | TGGAGAAGTCAGAACGAAGATCAGTAAGAGGAG | |
| | AACAACTTTAGATATGG | 3250 |
| | CCATATCTAAAGTTGTT | 3251 |
| Non polyposis | TTTCTTCTTGATTATCAAGGCTTGGACCCTGGCAAACAGATTA | 3252 |
| colorectal cancer | AACTGGATTCCAGTGCACAGTTTGGATATTACTTTCGTGTAAC | |
| Gln518Term | CTGTAAGGAAGAAAAAGTCCTTCGTAACAATAAAA | |
| CAG-TAG | TTTTATTGTTACGAAGGACTTTTTCTTCCTTACAGGTTACACGA | 3253 |
| | AAGTAATATCCAAACTGTGCACTGGAATCCAGTTTAATCTGTT | |
| | TGCCAGGGTCCAAGCCTTGATAATCAAGAAGAAA | |
| | CCAGTGCACAGTTTGGA | 3254 |
| | TCCAAACTGTGCACTGG | 3255 |
| Non polyposis | GCTTGGACCCTGGCAAACAGATTAAACTGGATTCCAGTGCAC | 3256 |
| colorectal cancer | AGTTTGGATATTACTTTCGTGTAACCTGTAAGGAAGAAAAAGT | |
| Arg524Pro | CCTTCGTAACAATAAAAACTTTAGTACTGTAGATAT | |
| CGT-CCT | ATATCTACAGTACTAAAGTTTTTATTGTTACGAAGGACTTTTTC | 3257 |
| | TTCCTTACAGGTTACACGAAAGTAATATCCAAACTGTGCACTG | |
| | GAATCCAGTTTAATCTGTTTGCCAGGGTCCAAGC | |
| | TTACTTTCGTGTAACCT | 3258 |
| | AGGTTACACGAAAGTAA | 3259 |
| Non polyposis | TTAATATTTTTAATAAAACTGTTATTTCGATTTGCAGCAAATTG | 3260 |
| colorectal cancer | ACTTCTTTAAATGAAGAGTATACCAAAAATAAAACAGAATATG | |
| Glu562Val | AAGAAGCCCAGGATGCCATTGTTAAAGAAATTGT | |
| GAG-GTG | ACAATTTCTTTAACAATGGCATCCTGGGCTTCTTCATATTCTGT | 3261 |
| | TTTATTTTTGGTATACTCTTCATTTAAAGAAGTCAATTTGCTGC | |
| | AAATCGAAATAACAGTTTTATTAAAAATATTAA | |
| | AAATGAAGAGTATACCA | 3262 |
| | TGGTATACTCTTCATTT | 3263 |
| Glioma | AATGAAGAGTATACCAAAAATAAAACAGAATATGAAGAAGCCC | 3264 |
| Glu580Term | AGGATGCCATTGTTAAAGAAATTGTCAATATTTCTTCAGGTAA | |
| GAA-TAA | ACTTAATAGAACTAATAATGTTCTGAATGTCACCT | |
| | AGGTGACATTCAGAACATTATTAGTTCTATTAAGTTTACCTGAA | 3265 |
| | GAAATATTGACAATTTCTTTAACAATGGCATCCTGGGCTTCTT | |
| | CATATTCTGTTTTATTTTTGGTATACTCTTCATT | |
| | TTGTTAAAGAAATTGTC | 3266 |
| | GACAATTTCTTTAACAA | 3267 |
| Non polyposis | TGTTTTTATTTTTATACAGGCTATGTAGAACCAATGCAGACACT | 3268 |
| colorectal cancer | CAATGATGTGTTAGCTCAGCTAGATGCTGTTGTCAGCTTTGCT | |
| Gln601Term | CACGTGTCAAATGGAGCACCTGTTCCATATGTAC | |
| GAG-TAG | GTACATATGGAACAGGTGCTCCATTTGACACGTGAGCAAAGC | 3269 |
| | TGACAACAGCATCTAGCTGAGCTAACACATCATTGAGTGTCT | |
| | GCATTGGTTCTACATAGCCTGTATAAAAATAAAAACA | |
| | TGTTAGCTCAGCTAGAT | 3270 |
| | ATCTAGCTGAGCTAACA | 3271 |
| Non polyposis | AGCTCAGCTAGATGCTGTTGTCAGCTTTGCTCACGTGTCAAAT | 3272 |
| colorectal cancer | GGAGCACCTGTTCCATATGTACGACCAGCCATTTTGGAGAAA | |
| Tyr619Term | GGACAAGGAAGAATTATATTAAAAGCATCCAGGCAT | |
| TAT-TAG | ATGCCTGGATGCTTTTAATATAATTCTTCCTTGTCCTTTCTCCA | 3273 |
| | AAATGGCTGGTCGTACATATGGAACAGGTGCTCCATTTGACA | |
| | CGTGAGCAAAGCTGACAACAGCATCTAGCTGAGCT | |
| | GTTCCATATGTACGACC | 3274 |
| | GGTCGTACATATGGAAC | 3275 |
| Non polyposis | CAGCTAGATGCTGTTGTCAGCTTTGCTCACGTGTCAAATGGA | 3276 |
| colorectal cancer | GCACCTGTTCCATATGTACGACCAGCCATTTTGGAGAAAGGA | |
| Arg621Term | CAAGGAAGAATTATATTAAAAGCATCCAGGCATGCTT | |
| CGA-TGA | AAGCATGCCTGGATGCTTTTAATATAATTCTTCCTTGTCCTTTC | 3277 |
| | TCCAAAATGGCTGGTCGTACATATGGAACAGGTGCTCCATTT | |
| | GACACGTGAGCAAAGCTGACAACAGCATCTAGCTG | |
| | CATATGTACGACCAGCC | 3278 |
| | GGCTGGTCGTACATATG | 3279 |
| Non polyposis | TAGATGCTGTTGTCAGCTTTGCTCACGTGTCAAATGGAGCAC | 3280 |
| colorectal cancer | CTGTTCCATATGTACGACCAGCCATTTTGGAGAAAGGACAAG | |
| Pro622Leu | GAAGAATTATATTAAAAGCATCCAGGCATGCTTGTGT | |
| CCA-CTA | ACACAAGCATGCCTGGATGCTTTTAATATAATTCTTCCTTGTC | 3281 |
| | CTTTCTCCAAAATGGCTGGTCGTACATATGGAACAGGTGCTC | |
| | CATTTGACACGTGAGCAAAGCTGACAACAGCATCTA | |
| | TGTACGACCAGCCATTT | 3282 |
| | AAATGGCTGGTCGTACA | 3283 |
| Non polyposis | CCTGTTCCATATGTACGACCAGCCATTTTGGAGAAAGGACAA | 3284 |
| colorectal cancer | GGAAGAATTATATTAAAAGCATCCAGGCATGCTTGTGTTGAAG | |
| Ala636Pro | TTCAAGATGAAATTGCATTTATTCCTAATGACGTAT | |
| GCA-CCA | ATACGTCATTAGGAATAAATGCAATTTCATCTTGAACTTCAACA | 3285 |
| | CAAGCATGCCTGGATGCTTTTAATATAATTCTTCCTTGTCCTTT | |
| | CTCCAAAATGGCTGGTCGTACATATGGAACAGG | |
| | TATTAAAAGCATCCAGG | 3286 |
| | CCTGGATGCTTTTAATA | 3287 |
| Non polyposis | ATGTACGACCAGCCATTTTGGAGAAAGGACAAGGAAGAATTA | 3288 |
| colorectal cancer | TATTAAAAGCATCCAGGCATGCTTGTGTTGAAGTTCAAGATGA | |
| His639Arg | AATTGCATTTATTCCTAATGACGTATACTTTGAAAA | |
| CAT-CGT | TTTTCAAAGTATACGTCATTAGGAATAAATGCAATTTCATCTTG | 3289 |
| | AACTTCAACACAAGCATGCCTGGATGCTTTTAATATAATTCTT | |
| | CCTTGTCCTTTCTCCAAAATGGCTGGTCGTACAT | |
| | ATCCAGGCATGCTTGTG | 3290 |
| | CACAAGCATGCCTGGAT | 3291 |
| Non polyposis | TATGTACGACCAGCCATTTTGGAGAAAGGACAAGGAAGAATT | 3292 |
| colorectal cancer | ATATTAAAAGCATCCAGGCATGCTTGTGTTGAAGTTCAAGATG | |
| His639Tyr | AAATTGCATTTATTCCTAATGACGTATACTTTGAAA | |
| CAT-TAT | TTTCAAAGTATACGTCATTAGGAATAAATGCAATTTCATCTTGA | 3293 |
| | ACTTCAACACAAGCATGCCTGGATGCTTTTAATATAATTCTTC | |
| | CTTGTCCTTTCTCCAAAATGGCTGGTCGTACATA | |
| | CATCCAGGCATGCTTGT | 3294 |
| | ACAAGCATGCCTGGATG | 3295 |
| Non polyposis | AAAGGACAAGGAAGAATTATATTAAAAGCATCCAGGCATGCTT | 3296 |
| colorectal cancer | GTGTTGAAGTTCAAGATGAAATTGCATTTATTCCTAATGACGT | |
| Glu647Lys | ATACTTTGAAAAAGATAAACAGATGTTCCACATCA | |
| GAA-AAA | TGATGTGGAACATCTGTTTATCTTTTTCAAAGTATACGTCATTA | 3297 |
| | GGAATAAATGCAATTTCATCTTGAACTTCAACACAAGCATGCC | |
| | TGGATGCTTTTAATATAATTCTTCCTTGTCCTTT | |
| | TTCAAGATGAAATTGCA | 3298 |
| | TGCAATTTCATCTTGAA | 3299 |
| Non polyposis | ATCCAGGCATGCTTGTGTTGAAGTTCAAGATGAAATTGCATTT | 3300 |
| colorectal cancer | ATTCCTAATGACGTATACTTTGAAAAAGATAAACAGATGTTCC | |
| Tyr656Term | ACATCATTACTGGTAAAAAACCTGGTTTTTGGGCT | |
| TAC-TAG | AGCCCAAAAACCAGGTTTTTTACCAGTAATGATGTGGAACATC | 3301 |
| | TGTTTATCTTTTTCAAAGTATACGTCATTAGGAATAAATGCAAT | |
| | TTCATCTTGAACTTCAACACAAGCATGCCTGGAT | |
| | GACGTATACTTTGAAAA | 3302 |
| | TTTTCAAAGTATACGTC | 3303 |
| Non polyposis | GAAAGAAGTTTAAAATCTTGCTTTCTGATATAATTTGTTTTGTA | 3304 |
| colorectal cancer | GGCCCCAATATGGGAGGTAAATCAACATATATTCGACAAACT | |
| Gly674Asp | GGGGTGATAGTACTCATGGCCCAAATTGGGTGTTT | |
| GGT-GAT | AAACACCCAATTTGGGCCATGAGTACTATCACCCCAGTTTGTC | 3305 |
| | GAATATATGTTGATTTACCTCCCATATTGGGGCCTACAAAACA | |
| | AATTATATCAGAAAGCAAGATTTTAAACTTCTTTC | |
| | TATGGGAGGTAAATCAA | 3306 |
| | TTGATTTACCTCCCATA | 3307 |
| Non polyposis | TTGCTTTCTGATATAATTTGTTTTGTAGGCCCCAATATGGGAG | 3308 |
| colorectal cancer | GTAAATCAACATATATTCGACAAACTGGGGTGATAGTACTCAT | |
| Arg680Term | GGCCCAAATTGGGTGTTTTGTGCCATGTGAGTCAG | |
| CGA-TGA | CTGACTCACATGGCACAAAACACCCAATTTGGGCCATGAGTA | 3309 |
| | CTATCACCCCAGTTTGTCGAATATATGTTGATTTACCTCCCAT | |
| | ATTGGGGCCTACAAAACAAATTATATCAGAAAGCAA | |
| | CATATATTCGACAAACT | 3310 |
| | AGTTTGTCGAATATATG | 3311 |
| Non polyposis | ATGGGAGGTAAATCAACATATATTCGACAAACTGGGGTGATA | 3312 |
| colorectal cancer | GTACTCATGGCCCAAATTGGGTGTTTTGTGCCATGTGAGTCA | |
| Gly692Arg | GCAGAAGTGTCCATTGTGGACTGCATCTTAGCCCGAG | |
| GGG-CGG | CTCGGGCTAAGATGCAGTCCACAATGGACACTTCTGCTGACT | 3313 |
| | CACATGGCACAAAACACCCAATTTGGGCCATGAGTACTATCA | |
| | CCCCAGTTTGTCGAATATATGTTGATTTACCTCCCAT | |
| | CCCAAATTGGGTGTTTT | 3314 |
| | AAAACACCCAATTTGGG | 3315 |
| Non polyposis | ACATATATTCGACAAACTGGGGTGATAGTACTCATGGCCCAA | 3316 |
| colorectal cancer | ATTGGGTGTTTTGTGCCATGTGAGTCAGCAGAAGTGTCCATT | |
| Cys697Arg | GTGGACTGCATCTTAGCCCGAGTAGGGGCTGGTGACA | |
| TGT-CGT | TGTCACCAGCCCCTACTCGGGCTAAGATGCAGTCCACAATGG | 3317 |
| | ACACTTCTGCTGACTCACATGGCACAAAACACCCAATTTGGG | |
| | CCATGAGTACTATCACCCCAGTTTGTCGAATATATGT | |
| | TTGTGCCATGTGAGTCA | 3318 |
| | TGACTCACATGGCACAA | 3319 |
| Non polyposis | CATATATTCGACAAACTGGGGTGATAGTACTCATGGCCCAAAT | 3320 |
| colorectal cancer | TGGGTGTTTTGTGCCATGTGAGTCAGCAGAAGTGTCCATTGT | |
| Cys697Phe | GGACTGCATCTTAGCCCGAGTAGGGGCTGGTGACAG | |
| TGT-TTT | CTGTCACCAGCCCCTACTCGGGCTAAGATGCAGTCCACAATG | 3321 |
| | GACACTTCTGCTGACTCACATGGCACAAAACACCCAATTTGG | |
| | GCCATGAGTACTATCACCCCAGTTTGTCGAATATATG | |
| | TGTGCCATGTGAGTCAG | 3322 |
| | CTGACTCACATGGCACA | 3323 |
| Non polyposis | GAGTCAGCAGAAGTGTCCATTGTGGACTGCATCTTAGCCCGA | 3324 |
| colorectal cancer | GTAGGGGCTGGTGACAGTCAATTGAAAGGAGTCTCCACGTTC | |
| Gln718Term | ATGGCTGAAATGTTGGAAACTGCTTCTATCCTCAGGT | |
| CAA-TAA | ACCTGAGGATAGAAGCAGTTTCCAACATTTCAGCCATGAACG | 3325 |
| | TGGAGACTCCTTTCAATTGACTGTCACCAGCCCCTACTCGGG | |
| | CTAAGATGCAGTCCACAATGGACACTTCTGCTGACTC | |
| | GTGACAGTCAATTGAAA | 3326 |
| | TTTCAATTGACTGTCAC | 3327 |
| Non polyposis | CCAATCAGATACCAACTGTTAATAATCTACATGTCACAGCACT | 3328 |
| colorectal cancer | CACCACTGAAGAGACCTTAACTATGCTTTATCAGGTGAAGAAA | |
| Leu811Term | GGTATGTACTATTGGAGTACTCTAAATTCAGAACT | |
| TTA-TGA | AGTTCTGAATTTAGAGTACTCCAATAGTACATACCTTTCTTCAC | 3329 |
| | CTGATAAAGCATAGTTAAGGTCTCTTCAGTGGTGAGTGCTGT | |
| | GACATGTAGATTATTAACAGTTGGTATCTGATTGG | |
| | AGAGACCTTAACTATGC | 3330 |
| | GCATAGTTAAGGTCTCT | 3331 |
| Non polyposis | TTCCCCAAATTTCTTATAGGTGTCTGTGATCAAAGTTTTGGGA | 3332 |
| colorectal cancer | TTCATGTTGCAGAGCTTGCTAATTTCCCTAAGCATGTAATAGA | |
| Ala834Thr | GTGTGCTAAACAGAAAGCCCTGGAACTTGAGGAGT | |
| GCT-ACT | ACTCCTCAAGTTCCAGGGCTTTCTGTTTAGCACACTCTATTAC | 3333 |
| | ATGCTTAGGGAAATTAGCAAGCTCTGCAACATGAATCCCAAAA | |
| | CTTTGATCACAGACACCTATAAGAAATTTGGGGAA | |
| | CAGAGCTTGCTAATTTC | 3334 |
| | GAAATTAGCAAGCTCTG | 3335 |
| Non polyposis | ATAGAGTGTGCTAAACAGAAAGCCCTGGAACTTGAGGAGTTT | 3336 |
| colorectal cancer | CAGTATATTGGAGAATCGCAAGGATATGATATCATGGAACCA | |
| Gln861Term | GCAGCAAAGAAGTGCTATCTGGAAAGAGAGGTTTGTC | |
| CAA-TAA | GACAAACCTCTCTTTCCAGATAGCACTTCTTTGCTGCTGGTTC | 3337 |
| | CATGATATCATATCCTTGCGATTCTCCAATATACTGAAACTCC | |
| | TCAAGTTCCAGGGCTTTCTGTTTAGCACACTCTAT | |
| | GAGAATCGCAAGGATAT | 3338 |
| | ATATCCTTGCGATTCTC | 3339 |
| Non polyposis | AGGAGTTCCTGTCCAAGGTGAAACAAATGCCCTTTACTGAAAT | 3340 |
| colorectal cancer | GTCAGAAGAAAACATCACAATAAAGTTAAAACAGCTAAAAGCT | |
| Thr905Arg | GAAGTAATAGCAAAGAATAATAGCTTTGTAAATGA | |
| ACA-AGA | TCATTTACAAAGCTATTATTCTTTGCTATTACTTCAGCTTTTAG | 3341 |
| | CTGTTTTAACTTTATTGTGATGTTTTCTTCTGACATTTCAGTAA | |
| | AGGGCATTTGTTTCACCTTGGACAGGAACTCCT | |
| | AAACATCACAATAAAGT | 3342 |
| | ACTTTATTGTGATGTTT | 3343 |

### EXAMPLE 20

### Human Mismatch Repair—MSH6

[0235] The human MSH6 gene is homologous to the bacterial mutS gene, which is involved in mismatch repair. Mutations in the MSH6 gene have been identified in a variety of cancers, including particularly hereditary nonpolyposis colorectal cancer. The attached table discloses the correcting oligonucleotide base sequences for the MSH6 oligonucleotides of the invention.

TABLE 22
MSH6 Mutations and Genome-Correcting Oligos

| Clinical Phenotype & | | SEQ ID |
|---|---|---|
| Mutation | Correcting Oligos | NO: |
| Non-polyposis | GGAAATCAGTCCGTGTTCATGTACAGTTTTTTGATGACAGCCC | 3344 |
| colorectal cancer | AACAAGGGGCTGGGTTAGCAAAAGGCTTTTAAAGCCATATAC | |
| Ser144Ile | AGGTAAGAGTCACTACTGCCATGTGTGTGTGTTTGT | |
| AGC-ATC | ACAAACACACACACATGGCAGTAGTGACTCTTACCTGTATATG | 3345 |
| | GCTTTAAAAGCCTTTTGCTAACCCAGCCCCTTGTTGGGCTGT | |
| | CATCAAAAAACTGTACATGAACACGGACTGATTTCC | |
| | CTGGGTTAGCAAAAGGC | 3346 |
| | GCCTTTTGCTAACCCAG | 3347 |
| Endometrial cancer | CGTGAGCCTCTGCACCCGGCCCTTATTGTTTATAAATACATTT | 3348 |
| Ser156Term | CTTTCTAGGTTCAAAATCAAAGGAAGCCCAGAAGGGAGGTCA | |
| TCA-TGA | TTTTTACAGTGCAAAGCCTGAAATACTGAGAGCAAT | |
| | ATTGCTCTCAGTATTTCAGGCTTTGCACTGTAAAAATGACCTC | 3349 |
| | CCTTCTGGGCTTCCTTTGATTTTGAACCTAGAAAGAAATGTAT | |
| | TTATAAACAATAAGGGCCGGGTGCAGAGGCTCACG | |
| | TTCAAAATCAAAGGAAG | 3350 |
| | CTTCCTTTGATTTTGAA | 3351 |
| Early onset colorectal | TTCCAAATTTIGATTTGTTTTTAAATACTCTTTCCTTGCCTGGC | 3352 |
| cancer | AGGTAGGCACAACTTACGTAACAGATAAGAGTGAAGAAGATA | |
| Tyr214Term | ATGAAATTGAGAGTGAAGAGGAAGTACAGCCTAAG | |
| TAC-TAG | CTTAGGCTGTACTTCCTCTTCACTCTCAATTTCATTATCTTCTT | 3353 |
| | CACTCTTATCTGTTACGTAAGTTGTGCCTACCTGCCAGGCAA | |
| | GGAAAGAGTATTTAAAAACAAATCAAAATTTGGAA | |
| | ACAACTTACGTAACAGA | 3354 |
| | TCTGTTACGTAAGTTGT | 3355 |
| Endometrial cancer | GAAGAGGAAGTACAGCCTAAGACACAAGGATCTAGGCGAAGT | 3356 |
| Arg248Term | AGCCGCCAAATAAAAAAACGAAGGGTCATATCAGATTCTGAG | |
| CGA-TGA | AGTGACATTGGTGGCTCTGATGTGGAATTTAAGCCAG | |
| | CTGGCTTAAATTCCACATCAGAGCCACCAATGTCACTCTCAGA | 3357 |
| | ATCTGATATGACCCTTCGTTTTTTTATTTGGCGGCTACTTCGC | |
| | CTAGATCCTTGTGTCTTAGGCTGTACTTCCTCTTC | |
| | TAAAAAAAGGAAGGGTC | 3358 |
| | GACCCTTCGTTTTTTTA | 3359 |
| Colorectal cancer | TTAAGCCAGACACTAAGGAGGAAGGAAGCAGTGATGAAATAA | 3360 |
| Ser285Ile | GCAGTGGAGTGGGGGATAGTGAGAGTGAAGGCCTGAACAGC | |
| AGT-ATT | CCTGTCAAAGTTGCTCGAAAGCGGAAGAGAATGGTGAC | |
| | GTCACCATTCTCTTCCGCTTTCGAGCAACTTTGACAGGGCTG | 3361 |
| | TTCAGGCCTTCACTCTCACTATCCCCCACTCCACTGCTTATTT | |
| | CATCACTGCTTCCTTCCTCCTTAGTGTCTGGCTTAA | |
| | GGGGGATAGTGAGAGTG | 3362 |
| | CACTCTCACTATCCCCC | 3363 |
| Colorectal cancer | GAGGAAGATTCTTCTGGCCATACTCGTGCATATGGTGTGTGC | 3364 |
| Gly566Arg | TTTGTTGATACTTCACTGGGAAAGTTTTTCATAGGTCAGTTTTC | |
| GGA-AGA | AGATGATCGCCATTGTTCGAGATTTAGGACTCTAG | |
| | CTAGAGTCCTAAATCTCGAACAATGGCGATCATCTGAAAACTG | 3365 |
| | ACCTATGAAAAACTTTCCCAGTGAAGTATCAACAAAGCACACA | |
| | CCATATGCACGAGTATGGCCAGAAGAATCTTCCTC | |
| | CTTCACTGGGAAAGTTT | 3366 |
| | AAACTTTCCCAGTGAAG | 3367 |
| Non-polyposis | GAATTGGCCCTCTCTGCTCTAGGTGGTTGTGTCTTCTACCTCA | 3368 |
| colorectal cancer | AAAAATGCCTTATTGATCAGGAGCTTTTATCAATGGCTAATTTT | |
| Gln698Glu | GAAGAATATATTCCCTTGGATTCTGACACAGTCA | |
| CAG-GAG | TGACTGTGTCAGAATCCAAGGGAATATATTCTTCAAAATTAGC | 3369 |
| | CATTGATAAAAGCTCCTGATCAATAAGGCATTTTTTGAGGTAG | |
| | AAGACACAACCACCTAGAGCAGAGAGGGCCAATTC | |
| | TTATTGATCAGGAGCTT | 3370 |
| | AAGCTCCTGATCAATAA | 3371 |
| Endometrial cancer | CCCTTGGATTCTGACACAGTCAGCACTACAAGATCTGGTGCT | 3372 |
| Gln731Term | ATCTTCACCAAAGCCTATCAACGAATGGTGCTAGATGCAGTG | |
| CAA-TAA | ACATTAAACAACTTGGAGATTTTTCTGAATGGAACAA | |
| | TTGTTCCATTCAGAAAAATCTCCAAGTTGTTTAATGTCACTGC | 3373 |
| | ATCTAGCACCATTCGTTGATAGGCTTTGGTGAAGATAGCACC | |
| | AGATCTTGTAGTGCTGACTGTGTCAGAATCCAAGGG | |
| | AAGCCTATCAACGAATG | 3374 |
| | CATTCGTTGATAGGCTT | 3375 |
| Colorectal cancer | GCCCCACTCTGTAACCATTATGCTATTAATGATCGTCTAGATG | 3376 |
| Val800Leu | CCATAGAAGACCTCATGGTTGTGCCTGACAAAATCTCCGAAG | |
| GTT-CTT | TTGTAGAGCTTCTAAAGTAAGCTTCCAGATCTTGAGA | |
| | TCTCAAGATCTGGAAGCTTCTTTAGAAGCTCTACAACTTCGGA | 3377 |
| | GATTTTGTCAGGCACAACCATGAGGTCTTCTATGGCATCTAGA | |
| | CGATCATTAATAGCATAATGGTTACAGAGTGGGGC | |
| | ACCTCATGGTTGTGCCT | 3378 |
| | AGGCACAACCATGAGGT | 3379 |
| Colorectal cancer | GTAACCATTATGCTATTAATGATCGTCTAGATGCCATAGAAGA | 3380 |
| Asp803Gly | CCTCATGGTTGTGCCTGACAAAATCTCCGAAGTTGTAGAGCT | |
| GAC-GGC | TCTAAAGAAGCTTCCAGATCTTGAGAGGCTACTCAG | |
| | CTGAGTAGCCTCTCAAGATCTGGAAGCTTCTTTAGAAGCTCTA | 3381 |
| | CAACTTCGGAGATTTTGTCAGGCACAACCATGAGGTCTTCTAT | |
| | GGCATCTAGACGATCATTAATAGCATTAATGGTTAC | |
| | TGTGCCTGACAAAATCT | 3382 |
| | AGATTTTGTCAGGCACA | 3383 |
| Non-polyposis | CTCCCCTGAAGAGTCAGAACCACCCAGACAGCAGGGCTATAA | 3384 |
| colorectal cancer | TGTATGAAGAAACTACATACAGCAAGAAGAAGATTATTGATTT | |
| Tyr850Cys | TCTTTCTGCTCTGGAAGGATTCAAAGTAATGTGTAA | |
| TAC-TGC | TTACACATTACTTTGAATCCTTCCAGAGCAGAAAGAAAATCAA | 3385 |
| | TAATCTTCTTCTTGCTGTATGTAGTTTCTTCATACATTATAGCC | |
| | CTGCTGTCTGGGTGGTTCTGACTCTTCAGGGGAG | |
| | AACTACATACAGCAAGA | 3386 |
| | TCTTGCTGTATGTAGTT | 3387 |
| Colorectal cancer | TATAGTCGAGGGGGTGATGGTCCTATGTGTCGCCCAGTAATT | 3388 |
| Pro1087Thr | CTGTTGCCGGAAGATACCCCCCCCTTCTTAGAGCTTAAAGGA | |
| CCC-ACC | TCACGCCATCCTTGCATTACGAAGACTTTTTTTGGAG | |
| | CTCCAAAAAAAGTCTTCGTAATGCAAGGATGGCGTGATCCTTT | 3389 |
| | AAGCTCTAAGAAGGGGGGGGTATCTTCCGGCAACAGAATTAC | |
| | TGGGCGACACATAGGACCATCACCCCCTCGACTATA | |
| | AAGATACCCCCCCCTTC | 3390 |
| | GAAGGGGGGGGTATCTT | 3391 |
| Non-polyposis | ACTATAAAATGTCGTACATTATTTTCAACTCACTACCATTCATT | 3392 |
| colorectal cancer | AGTAGAAGATTATTCTCAAAATGTTGCTGTGCGCCTAGGACAT | |
| Gln1258Term | ATGGTATGTGCAAATTGTTTTTTTCCACAAATTC | |
| CAA-TAA | GAATTTGTGGAAAAAAACAATTTGCACATACCATATGTCCTAG | 3393 |
| | GCGCACAGCAACATTTTGAGAATAATCTTCTACTAATGAATGG | |
| | TAGTGAGTTGAAAATAATGTACGACATTTTATAGT | |
| | ATTATTCTCAAAATGTT | 3394 |
| | AACATTTTGAGAATAAT | 3395 |

### EXAMPLE 21

### Hyperlipidemia APOE

[0236] Hyperlipidemia is the abnormal elevation of plasma cholesterol and/or triglyceride levels and it is one of the most common diseases. The human apolipoprotein E protein is involved in the transport of endogenous lipids and appears to be crucial for both the direct removal of cholesterol-rich LDL from plasma and conversion of IDL particles to LDL particles. Individuals who either lack apolipoprotein E or who are homozygous for particular alleles of apoE may have have a condition known as dysbetalipoproteinemia, which is characterized by elevated plasma cholesterol and triglyceride levels and an increased risk for atherosclerosis.

[0237] In a comprehensive review of apoE variants, de Knijff et al., Hum. Mutat. 4:178-194 (1994) found that 30 variants had been characterized, including the most common variant, apoE3. To that time, 14 apoE variants had been found to be associated with familial dysbetalipoproteinemia. The attached table discloses the correcting oligonucleotide base sequences for the APOE oligonucleotides of the invention.

TABLE 23

Apoe Mutations And Genome-Correcting Oligos

| | |
|---|---|
| Clinical Phenotype & | SEQ ID |

| | | |
|---|---|---|
| Mutation | Correcting Oligos | NO: |

| | | |
|---|---|---|
| Apolipoprotein E | TTGTTCCACACAGGATGCCAGGCCAAGGTGGAGCAAGCGGT | 3396 |
| Glu13Lys | GGAGACAGAGCCGGAGCCCGAGCTGCGCCAGCAGACCGAG | |
| cGAG-AAG | TGGCAGAGCGGCCAGCGCTGGGAACTGGCACTGGGTCGCT | |
| | AGCGACCCAGTGCCAGTTCCCAGCGCTGGCCGCTCTGCCAC | 3397 |
| | TCGGTCTGCTGGCGCAGCTCGGGCTCCGGCTCTGTCTCCAC | |
| | CGCTTGCTCCACCTTGGCCTGGCATCCTGTGTGGAACAA | |
| | CGGAGCCCGAGCTGCGC | 3398 |
| | GCGCAGCTCGGGCTCCG | 3399 |
| Apolipoprotein E | CAAGGTGGAGCAAGCGGTGGAGACAGAGCCGGAGCCCGAG | 3400 |
| Trp20Term | CTGCGCCAGCAGACCGAGTGGCAGAGCGGCCAGCGCTGGG | |
| TGGc-TGA | AACTGGCACTGGGTCGCTTTTGGGATTACCTGCGCTGGGTG | |
| | CACCCAGCGCAGGTAATCCCAAAAGCGACCCAGTGCCAGTT | 3401 |
| | CCCAGCGCTGGCCGCTCTGCCACTCGGTCTGCTGGCGCAGC | |
| | TCGGGCTCCGGCTCTGTCTCCACCGCTTGCTCCACCTTG | |
| | ACCGAGTGGCAGAGCGG | 3402 |
| | CCGCTCTGCCACTCGGT | 3403 |
| Apolipoprotein E | CAGAGCCGGAGCCCGAGCTGCGCCAGCAGACCGAGTGGCA | 3404 |
| Leu28Pro | GAGCGGCCAGCGCTGGGAACTGGCACTGGGTGGCTTTTGGG | |
| CTG-CCG | ATTACCTGCGCTGGGTGCAGACACTGTCTGAGCAGGTGCA | |
| | TGCACCTGCTCAGACAGTGTCTGCACCCAGCGCAGGTAATCC | 3405 |
| | CAAAAGCGACCCAGTGCCAGTTCCCAGCGCTGGCCGCTCTG | |
| | CCACTCGGTCTGCTGGCGCAGCTCGGGCTCCGGCTCTG | |
| | CTGGGAACTGGCACTGG | 3406 |
| | CCAGTGCCAGTTCCCAG | 3407 |
| Apolipoprotein E | CGGCTGTCCAAGGAGCTGCAGGCGGCGCAGGCCCGGCTGG | 3408 |
| Cys112Arg | GCGCGGACATGGAGGACGTGTGCGGCCGCCTGGTGCAGTA | |
| gTGC-CGC | CCGCGGCGAGGTGCAGGCCATGCTCGGCCAGAGCACCGAG | |
| | G | |
| | CCTCGGTGCTCTGGCCGAGCATGGCCTGCACCTCGCCGCGG | 3409 |
| | TACTGCACCAGGCGGCCGCACACGTCCTCCATGTCCGCGCC | |
| | CAGCCGGGCCTGCGCCGCCTGCAGCTCCTTGGACAGCCG | |
| | AGGACGTGTGCGGCCGC | 3410 |
| | GCGGCCGCACACGTCCT | 3411 |
| Apolipoprotein E | ACATGGAGGACGTGTGCGGCCGCCTGGTGCAGTACCGCGGC | 3412 |
| Gly127Asp | GAGGTGCAGGCCATGCTCGGCCAGAGCACCGAGGAGCTGC | |
| GGC-GAC | GGGTGCGCCTCGCCTCCCACCTGCGCAAGCTGCGTAAGCG | |
| | CGCTTACGCAGCTTGCGCAGGTGGGAGGCGAGGCGCACCC | 3413 |
| | GCAGCTCCTCGGTGCTCTGGCCGAGCATGGCCTGCACCTCG | |
| | CCGCGGTACTGCACCAGGCGGCCGCACACGTCCTCCATGT | |
| | CATGCTCGGCCAGAGCA | 3414 |
| | TGCTCTGGCCGAGCATG | 3415 |
| Apolipoprotein E | GTGCAGTACCGCGGCGAGGTGCAGGCCATGCTCGGCCAGA | 3416 |
| Arg136Cys | GCACCGAGGAGCTGCGGGTGCGCCTCGCCTCCCACCTGCG | |
| gCGC-TGC | CAAGCTGCGTAAGCGGCTCCTCCGCGATGCCGATGACCTGC | |
| | GCAGGTCATCGGCATCGCGGAGGAGCCGCTTACGCAGCTTG | 3417 |
| | CGCAGGTGGGAGGCGAGGCGCACCCGCAGCTCCTCGGTGC | |
| | TCTGGCCGAGCATGGCCTGCACCTCGCCGCGGTACTGCAC | |
| | TGCGGGTGCGCCTCGCC | 3418 |
| | GGCGAGGCGCACCCGCA | 3419 |
| Apolipoprotein E | TGCAGTACCGCGGCGAGGTGCAGGCCATGCTCGGCCAGAGC | 3420 |
| Arg136His | ACCGAGGAGCTGCGGGTGCGCCTCGCCTCCCACCTGCGCAA | |
| CGC-CAC | GCTGCGTAAGCGGCTCCTCCGCGATGCCGATGACCTGCA | |
| | TGCAGGTCATCGGCATCGCGGAGGAGCCGCTTACGCAGCTT | 3421 |
| | GCGCAGGTGGGAGGCGAGGCGCACCCGCAGCTCCTCGGTG | |
| | CTCTGGCCGAGCATGGCCTGCACCTCGCCGCGGTACTGCA | |
| | GCGGGTGCGCCTCGCCT | 3422 |
| | AGGCGAGGCGCACCCGC | 3423 |
| Apolipoprotein E | GTGCAGTACCGCGGCGAGGTGCAGGCCATGCTCGGCCAGA | 3424 |
| Arg136Ser | GCACCGAGGAGCTGCGGGTGCGCCTCGCCTCCCACCTGCG | |
| gCGC-AGC | CAAGCTGCGTAAGCGGCTCCTCCGCGATGCCGATGACCTGC | |
| | GCAGGTCATCGGCATCGCGGAGGAGCCGCTTACGCAGCTTG | 3425 |
| | CGCAGGTGGGAGGCGAGGCGCACCCGCAGCTCCTCGGTGC | |
| | TCTGGCCGAGCATGGCCTGCACCTCGCCGCGGTACTGCAC | |
| | GCGGGTGCGCCTCGCC | 3426 |
| | GGCGAGGCGCACCCGCA | 3427 |
| Apolipoprotein E | GTGCAGGCCATGCTCGGCCAGAGCACCGAGGAGCTGCGGG | 3428 |
| Arg142Cys | TGCGCCTCGCCTCCCACCTGCGCAAGCTGCGTAAGCGGCTC | |
| gCGC-TGC | CTCCGCGATGCCGATGACCTGCAGAAGCGCCTGGCAGTGT | |
| | ACACTGCCAGGCGCTTCTGCAGGTCATCGGCATCGCGGAGG | 3429 |
| | AGCCGCTTACGCAGCTTGCGCAGGTGGGAGGCGAGGCGCA | |
| | CCCGCAGCTCCTCGGTGCTCTGGCCGAGCATGGCCTGCAC | |
| | CCCACCTGCGCAAGCTG | 3430 |
| | CAGCTTGCGCAGGTGGG | 3431 |
| Apolipoprotein E | TGCAGGCCATGCTCGGCCAGAGCACCGAGGAGCTGCGGGT | 3432 |
| Arg142Leu | GCGCCTCGCCTCCCACCTGCGCAAGCTGCGTAAGCGGCTCC | |
| CGC-CTC | TCCGCGATGCCGATGACCTGCAGAAGCGCCTGGCAGTGTA | |
| | TACACTGCCAGGCGCTTCTGCAGGTCATCGGCATCGCGGAG | 3433 |
| | GAGCCGCTTACGCAGCTTGCGCAGGTGGGAGGCGAGGCGC | |
| | ACCCGCAGCTCCTCGGTGCTCTGGCCGAGCATGGCCTGCA | |
| | CCACCTGCGCAAGCTGC | 3434 |
| | GCAGCTTGCGCAGGTGG | 3435 |
| Apolipoprotein E | ATGCTCGGCCAGAGCACCGAGGAGCTGCGGGTGCGCCTCG | 3436 |
| Arg145Cys | CCTCCCACCTGCGCAAGCTGCGTAAGCGGCTCCTCCGCGAT | |
| gCGT-TGT | GCCGATGACCTGCAGAAGCGCCTGGCAGTGTACCAGGCCG | |
| | CGGCCTGGTACACTGCCAGGCGCTTCTGCAGGTCATCGGCA | 3437 |
| | TCGCGGAGGAGCCGCTTACGCAGCTTGCGCAGGTGGGAGG | |
| | CGAGGCGCACCCGCAGCTCCTCGGTGCTCTGGCCGAGCAT | |
| | GCAAGCTGCGTAAGCGG | 3438 |
| | CCGCTTACGCAGCTTGC | 3439 |
| Apolipoprotein E | TGCTCGGCCAGAGCACCGAGGAGCTGCGGGTGCGCCTCGC | 3440 |
| Arg145Pro | CTCCCACCTGCGCAAGCTGCGTAAGCGGCTCCTCCGCGATG | |
| CGT-CCT | CCGATGACCTGCAGAAGCGCCTGGCAGTGTACCAGGCCGG | |
| | CCGGCCTGGTACACTGCCAGGCGCTTCTGCAGGTCATCGGC | 3441 |
| | ATCGCGGAGGAGCCGCTTACGCAGCTTGCGCAGGTGGGAGG | |
| | CGAGGCGCACCCGCAGCTCCTCGGTGCTCTGGCCGAGCA | |
| | CAAGCTGCGTAAGCGGC | 3442 |
| | GCCGCTTACGCAGCTTG | 3443 |
| Apolipoprotein E | CTCGGCCAGAGCACCGAGGAGCTGCGGGTGCGCCTCGCCT | 3444 |
| Lys146Gln | CCCACCTGCGCAAGCTGCGTAAGCGGCTCCTCCGCGATGCC | |
| tAAG-CAG | GATGACCTGCAGAAGCGCCTGGCAGTGTACCAGGCCGGGG | |
| | CCCCGGCCTGGTACACTGCCAGGCGCTTCTGCAGGTCATCG | 3445 |
| | GCATCGCGGAGGAGCCGCTTACGCAGCTTGCGCAGGTGGGA | |
| | GGCGAGGCGCACCCGCAGCTCCTCGGTGCTCTGGCCGAG | |
| | AGCTGCGTAAGCGGCTC | 3446 |
| | GAGCCGCTTACGCAGCT | 3447 |
| Apolipoprotein E | CTCGGCCAGAGCACCGAGGAGCTGCGGGTGCGCCTCGCCT | 3448 |
| Lys146Glu | CCCACCTGCGCAAGCTGCGTAAGCGGCTCCTCCGCGATGCC | |
| tAAG-GAG | GATGACCTGCAGAAGCGCCTGGCAGTGTACCAGGCCGGGG | |
| | CCCCGGCCTGGTACACTGCCAGGCGCTTCTGCAGGTCATCG | 3449 |
| | GCATCGCGGAGGAGCCGCTTACGCAGCTTGCGCAGGTGGGA | |
| | GGCGAGGCGCACCCGCAGCTCCTCGGTGCTCTGGCCGAG | |
| | AGCTGCGTAAGCGGCTC | 3450 |
| | GAGCCGCTTACGCAGCT | 3451 |
| Apolipoprotein E | GCCTCCCACCTGCGCAAGCTGCGTAAGCGGCTCCTCCGCGA | 3452 |
| Arg158Cys | TGCCGATGACCTGCAGAAGCGCCTGGCAGTGTACCAGGCCG | |
| gCGC-TGC | GGGCCCGCGAGGGCGCCGAGCGCGGCCTCAGCGCCATCC | |
| | GGATGGCGCTGAGGCCGCGCTCGGCGCCCTCGCGGGCCCC | 3453 |
| | GGCCTGGTACACTGCCAGGCGCTTCTGCAGGTCATCGGCAT | |
| | CGCGGAGGAGCCGCTTACGCAGCTTGCGCAGGTGGGAGGC | |
| | TGCAGAAGCGCCTGGCA | 3454 |
| | TGCCAGGCGCTTCTGCA | 3455 |
| Apolipoprotein E | CGCGAGGGCGCCGAGCGCGGCCTCAGCGCCATCCGCGAGC | 3456 |
| Gln187Glu | GCCTGGGGCCCCTGGTGGAACAGGGCCGCGTGCGGGCCGC | |
| aCAG-GAG | CACTGTGGGCTCCCTGGCCGGCCAGCCGCTACAGGAGCGG | |
| | G | |
| | CCCGCTCCTGTAGCGGCTGGCCGGCCAGGGAGCCCACAGT | 3457 |
| | GGCGGCCCGCACGCGGCCCTGTTCCACCAGGGGCCCCAGG | |
| | CGCTCGCGGATGGCGCTGAGGCCGCGCTCGGCGCCCTCGC | |
| | G | |
| | TGGTGGAACAGGGCCGC | 3458 |
| | GCGGCCCTGTTCCACCA | 3459 |
| Apolipoprotein E | TGCGGGCCGCCACTGTGGGCTCCCTGGCCGGCCAGCCGCT | 3460 |
| Trp210Term | ACAGGAGCGGGCCCAGGCCTGGGGCGAGCGGCTGCGCGCG | |
| TGG-TAG | CGGATGGAGGAGATGGGCAGCCGGACCCGCGACCGCCTGG | |
| | A | |
| | TCCAGGCGGTCGCGGGTCCGGCTGCCCATCTCCTCCATCCG | 3461 |
| | CGCGCGCAGCCGCTCGCCCCAGGCCTGGGCCCGCTCCTGT | |
| | AGCGGCTGGCCGGCCAGGGAGCCCACAGTGGCGGCCCGCA | |
| | CCAGGCCTGGGGCGAGC | 3462 |
| | GCTCGCCCCAGGCCTGG | 3463 |
| Apolipoprotein E | CAGGCCTGGGGCGAGCGGCTGCGCGCGCGGATGGAGGAGA | 3464 |
| Arg228Cys | TGGGCAGCCGGACCCGCGACCGCCTGGACGAGGTGAAGGA | |
| cCGC-TGC | GCAGGTGGCGGAGGTGCGCGCCAAGCTGGAGGAGCAGGCC | |
| | C | |
| | GGGCCTGCTCCTCCAGCTTGGCGCGCACCTCCGCCACCTGC | 3465 |
| | TCCTTCACCTCGTCCAGGCGGTCGCGGGTCCGGCTGCCCAT | |
| | CTCCTCCATCCGCGCGCGCAGCCGCTCGCCCCAGGCCTG | |
| | CCCGCGACCGCCTGGAC | 3466 |
| | GTCCAGGCGGTCGCGGG | 3467 |
| Apolipoprotein E | CGGACCCGCGACCGCCTGGACGAGGTGAAGGAGCAGGTGG | 3468 |
| Glu244Lys | CGGAGGTGCGCGCCAAGCTGGAGGAGCAGGCCCAGCAGAT | |
| gGAG-AAG | ACGCCTGCAGGCCGAGGCCTTCCAGGCCCGCCTCAAGAGCT | |
| | AGCTCTTGAGGCGGGCCTGGAAGGCCTCGGCCTGCAGGCGT | 3469 |
| | ATCTGCTGGGCCTGCTCCTCCAGCTTGGCGCGCACCTCCGC | |
| | CACCTGCTCCTTCACCTCGTCCAGGCGGTCGCGGGTCCG | |
| | CCAAGCTGGAGGAGCAG | 3470 |
| | CTGCTCCTCCAGCTTGG | 3471 |

### EXAMPLE 22

### Familial Hypercholesterolemia—LDLR

[0238] Familial hypercholesterolemia is characterized by elevation of serum cholesterol bound to low density lipoprotein (LDL) and is, hence, one of the conditions producing a hyperlipoproteinemia phenotype. Familial hypercholesterolemia is an autosomal dominant disorder characterized by elevation of serum cholesterol bound to low density lipoprotein (LDL). Mutations in the LDL receptor (LDLR) gene cause this disorder. The attached table discloses the correcting oligonucleotide base sequences for the LDLR oligonucleotides of the invention.

TABLE 24

LDLR Mutations and Genome-Correcting Oligos

| | |
|---|---|
| Clinical Phenotype & | SEQ ID |

| | | |
|---|---|---|
| Mutation | Correcting Oligos | NO: |

| | | |
|---|---|---|
| Hypercholesterolaemia | GCGTTGAGAGACCCTTTCTCCTTTTCCTCTCTCTCAGTGGGC | 3472 |
| Glu10Term | GACAGATGCGAAAGAAACGAGTTCCAGTGCCAAGACGGGAA | |
| CGAG-TAG | ATGCATCTCCTACAAGTGGGTCTGCGATGGCAGCGCTG | |
| | CAGCGCTGCCATCGCAGACCCACTTGTAGGAGATGCATTTCC | 3473 |
| | CGTCTTGGCACTGGAACTCGTTTCTTTCGCATCTGTCGCCCA | |
| | CTGAGAGAGAGGAAAAGGAGAAAGGGTCTCTCAACGC | |
| | AAAGAAACGAGTTCCAG | 3474 |
| | CTGGAACTCGTTTCTTT | 3475 |
| Hypercholesterolaemia | AGAGACCCTTTCTCCTTTTCCTCTCTCTCAGTGGGCGACAGAT | 3476 |
| Gln12Term | GCGAAAGAAACGAGTTCCAGTGCCAAGACGGGAAATGCATCT | |
| cCAG-TAG | CCTACAAGTGGGTCTGCGATGGCAGCGCTGAGTGCC | |
| | GGCACTCAGCGCTGCCATCGCAGACCCACTTGTAGGAGATG | 3477 |
| | CATTTCCCGTCTTGGCACTGGAACTCGTTTCTTTCGCATCTGT | |
| | CGCCCACTGAGAGAGAGGAAAAGGAGAAAGGGTCTCT | |
| | ACGAGTTCCAGTGCCAA | 3478 |
| | TTGGCACTGGAACTCGT | 3479 |
| Hypercholesterolaemia | CCTTTCTCCTTTTCCTCTCTCTCAGTGGGCGACAGATGCGAAA | 3480 |
| Gln14Term | GAAACGAGTTCCAGTGCCAAGACGGGAAATGCATCTCCTACA | |
| cCAA-TAA | AGTGGGTCTGCGATGGCAGCGCTGAGTGCCAGGATG | |
| | CATCCTGGCACTCAGCGCTGCCATCGCAGACCCACTTGTAGG | 3481 |
| | AGATGCATTTCCCGTCTTGGCACTGGAACTCGTTTCTTTCGCA | |
| | TCTGTCGCCCACTGAGAGAGAGGAAAAGGAGAAAGG | |
| | TCCAGTGCCAAGACGGG | 3482 |
| | CCCGTCTTGGCACTGGA | 3483 |
| Hypercholesterolaemia | GCGACAGATGCGAAAGAAACGAGTTCCAGTGCCAAGACGGG | 3484 |
| Trp23Term | AAATGCATCTCCTACAAGTGGGTCTGCGATGGCAGCGCTGAG | |
| TGG-TAG | TGCCAGGATGGCTCTGATGAGTCCCAGGAGACGTGCTG | |
| | CAGCACGTCTCCTGGGACTCATCAGAGCCATCCTGGCACTCA | 3485 |
| | GCGCTGCCATCGCAGACCCACTTGTAGGAGATGCATTTCCCG | |
| | TCTTGGCACTGGAACTCGTTTCTTTCGCATCTGTCGC | |
| | CTACAAGTGGGTCTGCG | 3486 |
| | CGCAGACCCACTTGTAG | 3487 |
| Hypercholesterolaemia | AACGAGTTCCAGTGCCAAGACGGGAAATGCATCTCCTACAAG | 3488 |
| Ala29Ser | TGGGTCTGCGATGGCAGCGCTGAGTGCCAGGATGGCTCTGA | |
| cGCT-TCT | TGAGTCCCAGGAGACGTGCTGTGAGTCCCCTTTGGGCA | |
| | TGCCCAAAGGGGACTCACAGCACGTCTCCTGGGACTCATCA | 3489 |
| | GAGCCATCCTGGCACTCAGCGCTGCCATCGCAGACCCACTT | |
| | GTAGGAGATGCATTTCCCGTCTTGGCACTGGAACTCGTT | |
| | ATGGCAGCGCTGAGTGC | 3490 |
| | GCACTCAGCGCTGCCAT | 3491 |
| Hypercholesterolaemia | TCCAGTGCCAAGACGGGAAATGCATCTCCTACAAGTGGGTCT | 3492 |
| Cys31Tyr | GCGATGGCAGCGCTGAGTGCCAGGATGGCTCTGATGAGTCC | |
| TGC-TAC | CAGGAGACGTGCTGTGAGTCCCCTTTGGGCATGATATG | |
| | CATATCATGCCCAAAGGGGACTCACAGCACGTCTCCTGGGAC | 3493 |
| | TCATCAGAGCCATCCTGGCACTCAGCGCTGCCATCGCAGACC | |
| | CACTTGTAGGAGATGCATTTCCCGTCTTGGCACTGGA | |
| | CGCTGAGTGCCAGGATG | 3494 |
| | CATCCTGGCACTCAGCG | 3495 |
| Hypercholesterolaemia | AATCCTGTCTCTTCTGTAGTGTCTGTCACCTGCAAATCCGGG | 3496 |
| Arg57Cys | GACTTCAGCTGTGGGGGCCGTGTCAACCGCTGCATTCCTCA | |
| cCGT-TGT | GTTCTGGAGGTGCGATGGCCAAGTGGACTGCGACAACG | |
| | CGTTGTCGCAGTCCACTTGGCCATCGCACCTCCAGAACTGAG | 3497 |
| | GAATGCAGCGGTTGACACGGCCCCCACAGCTGAAGTCCCCG | |
| | GATTTGCAGGTGACAGACACTACAGAAGAGACAGGATT | |
| | GTGGGGGCCGTGTCAAC | 3498 |
| | GTTGACACGGCCCCCAC | 3499 |
| Hypercholesterolaemia | TCTGTCACCTGCAAATCCGGGGACTTCAGCTGTGGGGGCCG | 3500 |
| Gln64Term | TGTCAACCGCTGCATTCCTCAGTTCTGGAGGTGCGATGGCCA | |
| tCAG-TAG | AGTGGACTGCGACAACGGCTCAGACGAGCAAGGCTGTC | |
| | GACAGCCTTGCTCGTCTGAGCCGTTGTCGCAGTCCACTTGGC | 3501 |
| | CATCGCACCTCCAGAACTGAGGAATGCAGCGGTTGACACGG | |
| | CCCCCACAGCTGAAGTCCCCGGATTTGCAGGTGACAGA | |
| | GCATTCCTCAGTTCTGG | 3502 |
| | CCAGAACTGAGGAATGC | 3503 |
| Hypercholesterolaemia | ACCTGCAAATCCGGGGACTTCAGCTGTGGGGGCCGTGTCAA | 3504 |
| Trp66Gly | CCGCTGCATTCCTCAGTTCTGGAGGTGCGATGGCCAAGTGG | |
| cTGG-GGG | ACTGCGACAACGGCTCAGACGAGCAAGGCTGTCGTAAGT | |
| | ACTTACGACAGCCTTGCTCGTCTGAGCCGTTGTCGCAGTCCA | 3505 |
| | CTTGGCCATCGCACCTCCAGAACTGAGGAATGCAGCGGTTG | |
| | ACACGGCCCCCACAGCTGAAGTCCCCGGATTTGCAGGT | |
| | CTCAGTTCTGGAGGTGC | 3506 |
| | GCACCTCCAGAACTGAG | 3507 |
| Hypercholesterolaemia | CCTGCAAATCCGGGGACTTCAGCTGTGGGGGCCGTGTCAAC | 3508 |
| Trp66Term | CGCTGCATTCCTCAGTTCTGGAGGTGCGATGGCCAAGTGGA | |
| TGG-TAG | CTGCGACAACGGCTCAGACGAGCAAGGCTGTCGTAAGTG | |
| | CACTTACGACAGCCTTGCTCGTCTGAGCCGTTGTCGCAGTCC | 3509 |
| | ACTTGGCCATCGCACCTCCAGAACTGAGGAATGCAGCGGTTG | |
| | ACACGGCCCCCACAGCTGAAGTCCCCGGATTTGCAGG | |
| | TCAGTTCTGGAGGTGCG | 3510 |
| | CGCACCTCCAGAACTGA | 3511 |
| Hypercholesterolaemia | AAATCCGGGGACTTCAGCTGTGGGGGCCGTGTCAACCGCTG | 3512 |
| Cys68Arg | CATTCCTCAGTTCTGGAGGTGCGATGGCCAAGTGGACTGCGA | |
| gTGC-CGC | CAACGGCTCAGACGAGCAAGGCTGTCGTAAGTGTGGCC | |
| | GGCCACACTTACGACAGCCTTGCTCGTCTGAGCCGTTGTCGC | 3513 |
| | AGTCCACTTGGCCATCGCACCTCCAGAACTGAGGAATGCAGC | |
| | GGTTGACACGGCCCCCACAGCTGAAGTCCCCGGATTT | |
| | TCTGGAGGTGCGATGGC | 3514 |
| | GCCATCGCACCTCCAGA | 3515 |
| Hypercholesterolaemia | ATCCGGGGACTTCAGCTGTGGGGGCCGTGTCAACCGCTGCA | 3516 |
| Cys68Trp | TTCCTCAGTTCTGGAGGTGCGATGGCCAAGTGGACTGCGACA | |
| TGCg-TGG | ACGGCTCAGACGAGCAAGGCTGTCGTAAGTGTGGCCCT | |
| | AGGGCCACACTTACGACAGCCTTGCTCGTCTGAGCCGTTGTC | 3517 |
| | GCAGTCCACTTGGCCATCGCACCTCCAGAACTGAGGAATGCA | |
| | GCGGTTGACACGGCCCCCACAGCTGAAGTCCCCGGAT | |
| | TGGAGGTGCGATGGCCA | 3518 |
| | TGGCCATCGCACCTCCA | 3519 |
| Hypercholesterolaemia | AATCCGGGGACTTCAGCTGTGGGGGCCGTGTCAACCGCTGC | 3520 |
| Cys68Tyr | ATTCCTCAGTTCTGGAGGTGCGATGGCCAAGTGGACTGCGAC | |
| TGC-TAC | AACGGCTCAGACGAGCAAGGCTGTCGTAAGTGTGGCCC | |
| | GGGCCACACTTACGACAGCCTTGCTCGTCTGAGCCGTTGTCG | 3521 |
| | CAGTCCACTTGGCCATCGCACCTCCAGAACTGAGGAATGCAG | |
| | CGGTTGACACGGCCCCCACAGCTGAAGTCCCCGGATT | |
| | CTGGAGGTGCGATGGCC | 3522 |
| | GGCCATCGCACCTCCAG | 3523 |
| Hypercholesterolaemia | TCCGGGGACTTCAGCTGTGGGGGCCGTGTCAACCGCTGCAT | 3524 |
| Asp69Asn | TCCTCAGTTCTGGAGGTGCGATGGCCAAGTGGACTGCGACA | |
| cGAT-AAT | ACGGCTCAGACGAGCAAGGCTGTCGTAAGTGTGGCCCTG | |
| | CAGGGCCACACTTACGACAGCCTTGCTCGTCTGAGCCGTTGT | 3525 |
| | CGCAGTCCACTTGGCCATCGCACCTCCAGAACTGAGGAATGC | |
| | AGCGGTTGACACGGCCCCCACAGCTGAAGTCCCCGGA | |
| | GGAGGTGCGATGGCCAA | 3526 |
| | TTGGCCATCGCACCTCC | 3527 |
| Hypercholesterolaemia | CCGGGGACTTCAGCTGTGGGGGCCGTGTCAACCGCTGCATT | 3528 |
| Asp69Gly | CCTCAGTTCTGGAGGTGCGATGGCCAAGTGGACTGCGACAA | |
| GAT-GGT | CGGCTCAGACGAGCAAGGCTGTCGTAAGTGTGGCCCTGC | |
| | GCAGGGCCACACTTACGACAGCCTTGCTCGTCTGAGCCGTT | 3529 |
| | GTCGCAGTCCACTTGGCCATCGCACCTCCAGAACTGAGGAAT | |
| | GCAGCGGTTGACACGGCCCCCACAGCTGAAGTCCCCGG | |
| | GAGGTGCGATGGCCAAG | 3530 |
| | CTTGGCCATCGCACCTC | 3531 |
| Hypercholesterolaemia | TCCGGGGACTTCAGCTGTGGGGGCCGTGTCAACCGCTGCAT | 3532 |
| Asp69Tyr | TCCTCAGTTCTGGAGGTGCGATGGCCAAGTGGACTGCGACA | |
| cGAT-TAT | ACGGCTCAGACGAGCAAGGCTGTCGTAAGTGTGGCCCTG | |
| | CAGGGCCACACTTACGACAGCCTTGCTCGTCTGAGCCGTTGT | 3533 |
| | CGCAGTCCACTTGGCCATCGCACCTCCAGAACTGAGGAATGC | |
| | AGCGGTTGACACGGCCCCCACAGCTGAAGTCCCCGGA | |
| | GGAGGTGCGATGGCCAA | 3534 |
| | TTGGCCATCGCACCTCC | 3535 |
| Hypercholesterolaemia | GACTTCAGCTGTGGGGGCCGTGTCAACCGCTGCATTCCTCA | 3536 |
| Gln71Glu | GTTCTGGAGGTGCGATGGCCAAGTGGACTGCGACAACGGCT | |
| cCAA-GAA | CAGACGAGCAAGGCTGTCGTAAGTGTGGCCCTGCCTTTG | |
| | CAAAGGCAGGGCCACACTTACGACAGCCTTGCTCGTCTGAG | 3537 |
| | CCGTTGTCGCAGTCCACTTGGCCATCGCACCTCCAGAACTGA | |
| | GGAATGCAGCGGTTGACACGGCCCCCACAGCTGAAGTC | |
| | GCGATGGCCAAGTGGAC | 3538 |
| | GTCCACTTGGCCATCGC | 3539 |
| Hypercholesterolaemia | TGTGGGGGCCGTGTCAACCGCTGCATTCCTCAGTTCTGGAG | 3540 |
| Cys74Gly | GTGCGATGGCCAAGTGGACTGCGACAACGGCTCAGACGAGC | |
| cTGC-GGC | AAGGCTGTCGTAAGTGTGGCCCTGCCTTTGCTATTGAGC | |
| | GCTCAATAGCAAAGGCAGGGCCACACTTACGACAGCCTTGCT | 3541 |
| | CGTCTGAGCCGTTGTCGCAGTCCACTTGGCCATCGCACCTCC | |
| | AGAACTGAGGAATGCAGCGGTTGACACGGCCCCCACA | |
| | AAGTGGACTGCGACAAC | 3542 |
| | GTTGTCGCAGTCCACTT | 3543 |
| Hypercholesterolaemia | TCAACCGCTGCATTCCTCAGTTCTGGAGGTGCGATGGCCAAG | 3544 |
| Ser78Term | TGGACTGCGACAACGGCTCAGACGAGCAAGGCTGTCGTAAG | |
| TCA-TGA | TGTGGCCCTGCCTTTGCTATTGAGCCTATCTGAGTCCT | |
| | AGGACTCAGATAGGCTCAATAGCAAAGGCAGGGCCACACTTA | 3545 |
| | CGACAGCCTTGCTCGTCTGAGCCGTTGTCGCAGTCCACTTGG | |
| | CCATCGCACCTCCAGAACTGAGGAATGCAGCGGTTGA | |
| | CAACGGCTCAGACGAGC | 3546 |
| | GCTCGTCTGAGCCGTTG | 3547 |
| Hypercholesterolaemia | CGCTGCATTCCTCAGTTCTGGAGGTGCGATGGCCAAGTGGA | 3548 |
| Glu80Lys | CTGCGACAACGGCTCAGACGAGCAAGGCTGTCGTAAGTGTG | |
| cGAG-AAG | GCCCTGCCTTTGCTATTGAGCCTATCTGAGTCCTGGGGA | |
| | TCCCCAGGACTCAGATAGGCTCAATAGCAAAGGCAGGGCCA | 3549 |
| | CACTTACGACAGCCTTGCTCGTCTGAGCCGTTGTCGCAGTCC | |
| | ACTTGGCCATCGCACCTCCAGAACTGAGGAATGCAGCG | |
| | GCTCAGACGAGCAAGGC | 3550 |
| | GCCTTGCTCGTCTGAGC | 3551 |
| Hypercholesterolaemia | CGCTGCATTCCTCAGTTCTGGAGGTGCGATGGCCAAGTGGA | 3552 |
| Glu80Term | CTGCGACAACGGCTCAGACGAGCAAGGCTGTCGTAAGTGTG | |
| cGAG-TAG | GCCCTGCCTTTGCTATTGAGCCTATCTGAGTCCTGGGGA | |
| | TCCCCAGGACTCAGATAGGCTCAATAGCAAAGGCAGGGCCA | 3553 |
| | CACTTACGACAGCCTTGCTCGTCTGAGCCGTTGTCGCAGTCC | |
| | ACTTGGCCATCGCACCTCCAGAACTGAGGAATGCAGCG | |
| | GCTCAGACGAGCAAGGC | 3554 |
| | GCCTTGCTCGTCTGAGC | 3555 |
| Hypercholesterolaemia | TGCATTCCTCAGTTCTGGAGGTGCGATGGCCAAGTGGACTGC | 3556 |
| Gln81Term | GACAACGGCTCAGACGAGCAAGGCTGTCGTAAGTGTGGCCC | |
| gCAA-TAA | TGCCTTTGCTATTGAGCCTATCTGAGTCCTGGGGAGTG | |
| | CACTCCCCAGGACTCAGATAGGCTCAATAGCAAAGGCAGGG | 3557 |
| | CCACACTTACGACAGCCTTGCTCGTCTGAGCCGTTGTCGCAG | |
| | TCCACTTGGCCATCGCACCTCCAGAACTGAGGAATGCA | |
| | CAGACGAGCAAGGCTGT | 3558 |
| | ACAGCCTTGCTCGTCTG | 3559 |
| Hypercholesterolaemia | TGGGAGACTTCACACGGTGATGGTGGTCTCGGCCCATCCATC | 3560 |
| Cys88Arg | CCTGCAGCCCCCAAGACGTGCTCCCAGGACGAGTTTCGCTG | |
| gTGC-CGC | CCACGATGGGAAGTGCATCTCTCGGCAGTTCGTCTGTG | |
| | CACAGACGAACTGCCGAGAGATGCACTTCCCATCGTGGCAG | 3561 |
| | CGAAACTCGTCCTGGGAGCACGTCTTGGGGGCTGCAGGGAT | |
| | GGATGGGCCGAGACCACCATCACCGTGTGAAGTCTCCCA | |
| | CCAAGACGTGCTCCCAG | 3562 |
| | CTGGGAGCACGTCTTGG | 3563 |
| Hypercholesterolaemia | CACGGTGATGGTGGTCTCGGCCCATCCATCCCTGCAGCCCC | 3564 |
| Glu92Term | CAAGACGTGCTCCCAGGACGAGTTTCGCTGCCACGATGGGA | |
| cGAG-TAG | AGTGCATCTCTCGGCAGTTCGTCTGTGACTCAGACCGGG | |
| | CCCGGTCTGAGTCACAGACGAACTGCCGAGAGATGCACTTC | 3565 |
| | CCATCGTGGCAGCGAAACTCGTCCTGGGAGCACGTCTTGGG | |
| | GGCTGCAGGGATGGATGGGCCGAGACCACCATCACCGTG | |
| | CCCAGGACGAGTTTCGC | 3566 |
| | GCGAAACTCGTCCTGGG | 3567 |
| Hypercholesterolaemia | GGTGGTCTCGGCCCATCCATCCCTGCAGCCCCCAAGACGTG | 3568 |
| Cys9SArg | CTCCCAGGACGAGTTTCGCTGCCACGATGGGAAGTGCATCTC | |
| cTGC-CGC | TCGGCAGTTCGTCTGTGACTCAGACCGGGACTGCTTGG | |
| | CCAAGCAGTCCCGGTCTGAGTCACAGACGAACTGCCGAGAG | 3569 |
| | ATGCACTTCCCATCGTGGCAGCGAAACTCGTCCTGGGAGCA | |
| | CGTCTTGGGGGCTGCAGGGATGGATGGGCCGAGACCACC | |
| | AGTTTCGCTGCCACGAT | 3570 |
| | ATCGTGGCAGCGAAACT | 3571 |
| Hypercholesterolaemia | CTCGGCCCATCCATCCCTGCAGCCCCCAAGACGTGCTCCCA | 3572 |
| Asp97Tyr | GGACGAGTTTCGCTGCCACGATGGGAAGTGCATCTCTCGGC | |
| cGAT-TAT | AGTTCGTCTGTGACTCAGACCGGGACTGCTTGGACGGCT | |
| | AGCCGTCCAAGCAGTCCCGGTCTGAGTCACAGACGAACTGC | 3573 |
| | CGAGAGATGCACTTCCCATCGTGGCAGCGAAACTCGTCCTG | |
| | GGAGCACGTCTTGGGGGCTGCAGGGATGGATGGGCCGAG | |
| | GCTGCCACGATGGGAAG | 3574 |
| | CTTCCCATCGTGGCAGC | 3575 |
| Hypercholesterolaemia | GGGTCGGGACACTGCCTGGCAGAGGCTGCGAGCATGGGGC | 3576 |
| Trp(−12)Arg | CCTGGGGCTGGAAATTGCGCTGGACCGTCGCCTTGCTCCTC | |
| cTGG-AGG | GCCGCGGCGGGGACTGCAGGTAAGGCTTGCTCCAGGCGCC | |
| | GGCGCCTGGAGCAAGCCTTACCTGCAGTCCCCGCCGCGGCG | 3577 |
| | AGGAGCAAGGCGACGGTCCAGCGCAATTTCCAGCCCCAGGG | |
| | CCCCATGCTCGCAGCCTCTGCCAGGCAGTGTCCCGACCC | |
| | AATTGCGCTGGACCGTC | 3578 |
| | GACGGTCCAGCGCAATT | 3579 |
| Hypercholesterolaemia | CAGCAGGTCGTGATCCGGGTCGGGACACTGCCTGGCAGAGG | 3580 |
| Trp(−18)Term | CTGCGAGCATGGGGCCCTGGGGCTGGAAATTGCGCTGGACC | |
| TGGg-TGA | GTCGCCTTGCTCCTCGCCGCGGCGGGGACTGCAGGTAAG | |
| | CTTACCTGCAGTCCCCGCCGCGGCGAGGAGCAAGGCGACG | 3581 |
| | GTCCAGCGCAATTTCCAGCCCCAGGGCCCCATGCTCGCAGC | |
| | CTCTGCCAGGCAGTGTCCCGACCCGGATCACGACCTGCTG | |
| | GGGCCCTGGGGCTGGAA | 3582 |
| | TTCCAGCCCCAGGGCCC | 3583 |
| Hypercholesterolaemia | CAGCTAGGACACAGCAGGTCGTGATCCGGGTCGGGACACTG | 3584 |
| Met(−21)Leu | CCTGGCAGAGGCTGCGAGCATGGGGCCCTGGGGCTGGAAA | |
| cATG-TTG | TTGCGCTGGACCGTCGCCTTGCTCCTCGCCGCGGCGGGGA | |
| | TCCCCGCCGCGGCGAGGAGCAAGGCGACGGTCCAGCGCAA | 3585 |
| | TTTCCAGCCCCAGGGCCCCATGCTCGCAGCCTCTGCCAGGC | |
| | AGTGTCCCGACCCGGATCACGACCTGCTGTGTCCTAGCTG | |
| | CTGCGAGCATGGGGCCC | 3586 |
| | GGGCCCCATGCTCGCAG | 3587 |
| Hypercholesterolaemia | CAGCTAGGACACAGCAGGTCGTGATCCGGGTCGGGACACTG | 3588 |
| Met(−21)Val | CCTGGCAGAGGCTGCGAGCATGGGGCCCTGGGGCTGGAAA | |
| cATG-GTG | TTGCGCTGGACCGTCGCCTTGCTCCTCGCCGCGGCGGGGA | |
| | TCCCCGCCGCGGCGAGGAGCAAGGCGACGGTCCAGCGCAA | 3589 |
| | TTTCCAGCCCCAGGGCCCCATGCTCGCAGCCTCTGCCAGGC | |
| | AGTGTCCCGACCCGGATCACGACCTGCTGTGTCCTAGCTG | |
| | CTGCGAGCATGGGGCCC | 3590 |
| | GGGCCCCATGCTCGCAG | 3591 |
| Hypercholesterolaemia | ATCCCTGCAGCCCCCAAGACGTGCTCCCAGGACGAGTTTCG | 3592 |
| Ile101Phe | CTGCCACGATGGGAAGTGCATCTCTCGGCAGTTCGTCTGTGA | |
| cATC-TTC | CTCAGACCGGGACTGCTTGGACGGCTCAGACGAGGCCT | |
| | AGGCCTCGTCTGAGCCGTCCAAGCAGTCCCGGTCTGAGTCA | 3593 |
| | CAGACGAACTGCCGAGAGATGCACTTCCCATCGTGGCAGCG | |
| | AAACTCGTCCTGGGAGCACGTCTTGGGGGCTGCAGGGAT | |
| | GGAAGTGCATCTCTCGG | 3594 |
| | CCGAGAGATGCACTTCC | 3595 |
| Hypercholesterolaemia | GCCCCCAAGACGTGCTCCCAGGACGAGTTTCGCTGCCACGA | 3596 |
| Gln104Term | TGGGAAGTGCATCTCTCGGCAGTTCGTCTGTGACTCAGACCG | |
| gCAG-TAG | GGACTGCTTGGACGGCTCAGACGAGGCCTCCTGCCCGG | |
| | CCGGGCAGGAGGCCTCGTCTGAGCCGTCCAAGCAGTCCCGG | 3597 |
| | TCTGAGTCACAGACGAACTGCCGAGAGATGCACTTCCCATCG | |
| | TGGCAGCGAAACTCGTCCTGGGAGCACGTCTTGGGGGC | |
| | TCTCTCGGCAGTTCGTC | 3598 |
| | GACGAACTGCCGAGAGA | 3599 |
| Hypercholesterolaemia | TTTCGCTGCCACGATGGGAAGTGCATCTCTCGGCAGTTCGTC | 3600 |
| Cys113Arg | TGTGACTCAGACCGGGACTGCTTGGACGGCTCAGACGAGGC | |
| cTGC-CGC | CTCCTGCCCGGTGCTCACCTGTGGTCCCGCCAGCTTCC | |
| | GGAAGCTGGCGGGACCACAGGTGAGCACCGGGCAGGAGGC | 3601 |
| | CTCGTCTGAGCCGTCCAAGCAGTCCCGGTCTGAGTCACAGA | |
| | CGAACTGCCGAGAGATGCACTTCCCATCGTGGCAGCGAAA | |
| | ACCGGGACTGCTTGGAC | 3602 |
| | GTCCAAGCAGTCCCGGT | 3603 |
| Hypercholesterolaemia | AAGTGCATCTCTCGGCAGTTCGTCTGTGACTCAGACCGGGAC | 3604 |
| Glu119Lys | TGCTTGGACGGCTCAGACGAGGCCTCCTGCCCGGTGCTCAC | |
| cGAG-AAG | CTGTGGTCCCGCCAGCTTCCAGTGCAACAGCTCCACCT | |
| | AGGTGGAGCTGTTGCACTGGAAGCTGGCGGGACCACAGGTG | 3605 |
| | AGCACCGGGCAGGAGGCCTCGTCTGAGCCGTCCAAGCAGTC | |
| | CCGGTCTGAGTCACAGACGAACTGCCGAGAGATGCACTT | |
| | GCTCAGACGAGGCCTCC | 3606 |
| | GGAGGCCTCGTCTGAGC | 3607 |
| Hypercholesterolaemia | AAGTGCATCTCTCGGCAGTTCGTCTGTGACTCAGACCGGGAC | 3608 |
| Glu119Term | TGCTTGGACGGCTCAGACGAGGCCTCCTGCCCGGTGCTCAC | |
| cGAG-TAG | CTGTGGTCCCGCCAGCTTCCAGTGCAACAGCTCCACCT | |
| | AGGTGGAGCTGTTGCACTGGAAGCTGGCGGGACCACAGGTG | 3609 |
| | AGCACCGGGCAGGAGGCCTCGTCTGAGCCGTCCAAGCAGTC | |
| | CCGGTCTGAGTCACAGACGAACTGCCGAGAGATGCACTT | |
| | GCTCAGACGAGGCCTCC | 3610 |
| | GGAGGCCTCGTCTGAGC | 3611 |
| Hypercholesterolaemia | TCGGCAGTTCGTCTGTGACTCAGACCGGGACTGCTTGGACG | 3612 |
| Cys122Term | GCTCAGACGAGGCCTCCTGCCCGGTGCTCACCTGTGGTCCC | |
| TGCc-TGA | GCCAGCTTCCAGTGCAACAGCTCCACCTGCATCCCCCAG | |
| | CTGGGGGATGCAGGTGGAGCTGTTGCACTGGAAGCTGGCGG | 3613 |
| | GACCACAGGTGAGCACCGGGCAGGAGGCCTCGTCTGAGCC | |
| | GTCCAAGCAGTCCCGGTCTGAGTCACAGACGAACTGCCGA | |
| | GCCTCCTGCCCGGTGCT | 3614 |
| | AGCACCGGGCAGGAGGC | 3615 |
| Hypercholesterolaemia | TGACTCAGACCGGGACTGCTTGGACGGCTCAGACGAGGCCT | 3616 |
| Cys127Trp | CCTGCCCGGTGCTCACCTGTGGTCCCGCCAGCTTCCAGTGC | |
| TGTg-TGG | AACAGCTCCACCTGCATCCCCCAGCTGTGGGCCTGCGAC | |
| | GTCGCAGGCCCACAGCTGGGGGATGCAGGTGGAGCTGTTGC | 3617 |
| | ACTGGAAGCTGGCGGGACCACAGGTGAGCACCGGGCAGGA | |
| | GGCCTCGTCTGAGCCGTCCAAGCAGTCCCGGTCTGAGTCA | |
| | CTCACCTGTGGTCCCGC | 3618 |
| | GCGGGACCACAGGTGAG | 3619 |
| Hypercholesterolaemia | TGCTTGGACGGCTCAGACGAGGCCTCCTGCCCGGTGCTCAC | 3620 |
| Gln133Term | CTGTGGTCCCGCCAGCTTCCAGTGCAACAGCTCCACCTGCAT | |
| cCAG-TAG | CCCCCAGCTGTGGGCCTGCGACAACGACCCCGACTGCG | |
| | CGCAGTCGGGGTCGTTGTCGCAGGCCCACAGCTGGGGGATG | 3621 |
| | CAGGTGGAGCTGTTGCACTGGAAGCTGGCGGGACCACAGGT | |
| | GAGCACCGGGCAGGAGGCCTCGTCTGAGCCGTCCAAGCA | |
| | CCAGCTTCCAGTGCAAC | 3622 |
| | GTTGCACTGGAAGCTGG | 3623 |
| Hypercholesterolaemia | TTGGACGGCTCAGACGAGGCCTCCTGCCCGGTGCTCACCTG | 3624 |
| Cys134Gly | TGGTCCCGCCAGCTTCCAGTGCAACAGCTCCACCTGCATCCC | |
| gTGC-GGC | CCAGCTGTGGGCCTGCGACAACGACCCCGACTGCGAAG | |
| | CTTCGCAGTCGGGGTCGTTGTCGCAGGCCCACAGCTGGGGG | 3625 |
| | ATGCAGGTGGAGCTGTTGCACTGGAAGCTGGCGGGACCACA | |
| | GGTGAGCACCGGGCAGGAGGCCTCGTCTGAGCCGTCCAA | |
| | GCTTCCAGTGCAACAGC | 3626 |
| | GCTGTTGCACTGGAAGC | 3627 |
| Hypercholesterolaemia | GAGGCCTCCTGCCCGGTGCTCACCTGTGGTCCCGCCAGCTT | 3628 |
| Cys139Gly | CCAGTGCAACAGCTCCACCTGCATCCCCCAGCTGTGGGCCT | |
| cTGC-GGC | GCGACAACGACCCCGACTGCGAAGATGGCTCGGATGAGT | |
| | ACTCATCCGAGCCATCTTCGCAGTCGGGGTCGTTGTCGCAG | 3629 |
| | GCCCACAGCTGGGGGATGCAGGTGGAGCTGTTGCACTGGAA | |
| | GCTGGCGGGACCACAGGTGAGCACCGGGCAGGAGGCCTC | |
| | GCTCCACCTGCATCCCC | 3630 |
| | GGGGATGCAGGTGGAGC | 3631 |
| Hypercholesterolaemia | AGGCCTCCTGCCCGGTGCTCACCTGTGGTCCCGCCAGCTTC | 3632 |
| Cys139Tyr | CAGTGCAACAGCTCCACCTGCATCCCCCAGCTGTGGGCCTG | |
| TGC-TAC | CGACAACGACCCCGACTGCGAAGATGGCTCGGATGAGTG | |
| | CACTCATCCGAGCCATCTTCGCAGTCGGGGTCGTTGTCGCAG | 3633 |
| | GCCCACAGCTGGGGGATGCAGGTGGAGCTGTTGCACTGGAA | |
| | GCTGGCGGGACCACAGGTGAGCACCGGGCAGGAGGCCT | |
| | CTCCACCTGCATCCCCC | 3634 |
| | GGGGGATGCAGGTGGAG | 3635 |
| Hypercholesterolaemia | CTGTGGTCCCGCCAGCTTCCAGTGCAACAGCTCCACCTGCAT | 3636 |
| Cys146Term | CCCCCAGCTGTGGGCCTGCGACAACGACCCCGACTGCGAAG | |
| TGCg-TGA | ATGGCTCGGATGAGTGGCCGCAGCGCTGTAGGGGTCTT | |
| | AAGACCCCTACAGCGCTGCGGCCACTCATCCGAGCCATCTTC | 3637 |
| | GCAGTCGGGGTCGTTGTCGCAGGCCCACAGCTGGGGGATGC | |
| | AGGTGGAGCTGTTGCACTGGAAGCTGGCGGGACCACAG | |
| | TGGGCCTGCGACAACGA | 3638 |
| | TCGTTGTCGCAGGCCCA | 3639 |
| Hypercholesterolaemia | TGTGGTCCCGCCAGCTTCCAGTGCAACAGCTCCACCTGCATC | 3640 |
| Asp147Asn | CCCCAGCTGTGGGCCTGCGACAACGACCCCGACTGCGAAGA | |
| cGAC-AAC | TGGCTCGGATGAGTGGCCGCAGCGCTGTAGGGGTCTTT | |
| | AAAGACCCCTACAGCGCTGCGGCCACTCATCCGAGCCATCTT | 3641 |
| | CGCAGTCGGGGTCGTTGTCGCAGGCCCACAGCTGGGGGATG | |
| | CAGGTGGAGCTGTTGCACTGGAAGCTGGCGGGACCACA | |
| | GGGCCTGCGACAACGAC | 3642 |
| | GTCGTTGTCGCAGGCCC | 3643 |
| Hypercholesterolaemia | TGTGGTCCCGCCAGCTTCCAGTGCAACAGCTCCACCTGCATC | 3644 |
| Asp147His | CCCCAGCTGTGGGCCTGCGACAACGACCCCGACTGCGAAGA | |
| cGAC-CAC | TGGCTCGGATGAGTGGCCGCAGCGCTGTAGGGGTCTTT | |
| | AAAGACCCCTACAGCGCTGCGGCCACTCATCCGAGCCATCTT | 3645 |
| | CGCAGTCGGGGTCGTTGTCGCAGGCCCACAGCTGGGGGATG | |
| | CAGGTGGAGCTGTTGCACTGGAAGCTGGCGGGACCACA | |
| | GGGCCTGCGACAACGAC | 3646 |
| | GTCGTTGTCGCAGGCCC | 3647 |
| Hypercholesterolaemia | TGTGGTCCCGCCAGCTTCCAGTGCAACAGCTCCACCTGCATC | 3648 |
| Asp147Tyr | CCCCAGCTGTGGGCCTGCGACAACGACCCCGACTGCGAAGA | |
| cGAC-TAC | TGGCTCGGATGAGTGGCCGCAGCGCTGTAGGGGTCTTT | |
| | AAAGACCCCTACAGCGCTGCGGCCACTCATCCGAGCCATCTT | 3649 |
| | CGCAGTCGGGGTCGTTGTCGCAGGCCCACAGCTGGGGGATG | |
| | CAGGTGGAGCTGTTGCACTGGAAGCTGGCGGGACCACA | |
| | GGGCCTGCGACAACGAC | 3650 |
| | GTCGTTGTCGCAGGCCC | 3651 |
| Hypercholesterolaemia | TTCCAGTGCAACAGCTCCACCTGCATCCCCCAGCTGTGGGCC | 3652 |
| Cys152Arg | TGCGACAACGACCCCGACTGCGAAGATGGCTCGGATGAGTG | |
| cTGC-CGC | GCCGCAGCGCTGTAGGGGTCTTTACGTGTTCCAAGGGG | |
| | CCCCTTGGAACACGTAAAGACCCCTACAGCGCTGCGGCCAC | 3653 |
| | TCATCCGAGCCATCTTCGCAGTCGGGGTCGTTGTCGCAGGC | |
| | CCACAGCTGGGGGATGCAGGTGGAGCTGTTGCACTGGAA | |
| | ACCCCGACTGCGAAGAT | 3654 |
| | ATCTTCGCAGTCGGGGT | 3655 |
| Hypercholesterolaemia | TTCCAGTGCAACAGCTCCACCTGCATCCCCCAGCTGTGGGCC | 3656 |
| Cys152Gly | TGCGACAACGACCCCGACTGCGAAGATGGCTCGGATGAGTG | |
| cTGC-GGC | GCCGCAGCGCTGTAGGGGTCTTTACGTGTTCCAAGGGG | |
| | CCCCTTGGAACACGTAAAGACCCCTACAGCGCTGCGGCCAC | 3657 |
| | TCATCCGAGCCATCTTCGCAGTCGGGGTCGTTGTCGCAGGC | |
| | CCACAGCTGGGGGATGCAGGTGGAGCTGTTGCACTGGAA | |
| | ACCCCGACTGCGAAGAT | 3658 |
| | ATCTTCGCAGTCGGGGT | 3659 |
| Hypercholesterolaemia | CCAGTGCAACAGCTCCACCTGCATCCCCCAGCTGTGGGCCT | 3660 |
| Cys152Trp | GCGACAACGACCCCGACTGCGAAGATGGCTCGGATGAGTGG | |
| TGCg-TGG | CCGCAGCGCTGTAGGGGTCTTTACGTGTTCCAAGGGGAC | |
| | GTCCCCTTGGAACACGTAAAGACCCCTACAGCGCTGCGGCC | 3661 |
| | ACTCATCCGAGCCATCTTCGCAGTCGGGGTCGTTGTCGCAG | |
| | GCCCACAGCTGGGGGATGCAGGTGGAGCTGTTGCACTGG | |
| | CCCGACTGCGAAGATGG | 3662 |
| | CCATCTTCGCAGTCGGG | 3663 |
| Hypercholesterolaemia | TGCAACAGCTCCACCTGCATCCCCCAGCTGTGGGCCTGCGA | 3664 |
| Asp154Asn | CAACGACCCCGACTGCGAAGATGGCTCGGATGAGTGGCCGC | |
| aGAT-AAT | AGCGCTGTAGGGGTCTTTACGTGTTCCAAGGGGACAGTA | |
| | TACTGTCCCCTTGGAACACGTAAAGACCCCTACAGCGCTGCG | 3665 |
| | GCCACTCATCCGAGCCATCTTCGCAGTCGGGGTCGTTGTCG | |
| | CAGGCCCACAGCTGGGGGATGCAGGTGGAGCTGTTGCA | |
| | ACTGCGAAGATGGCTCG | 3666 |
| | CGAGCCATCTTCGCAGT | 3667 |
| Hypercholesterolaemia | GCTCCACCTGCATCCCCCAGCTGTGGGCCTGCGACAACGAC | 3668 |
| Ser56Leu | CCCGACTGCGAAGATGGCTCGGATGAGTGGCCGCAGCGCTG | |
| TCG-TTG | TAGGGGTCTTTACGTGTTCCAAGGGGACAGTAGCCCCTG | |
| | CAGGGGCTACTGTCCCCTTGGAACACGTAAAGACCCCTACAG | 3669 |
| | CGCTGCGGCCACTCATCCGAGCCATCTTCGCAGTCGGGGTC | |
| | GTTGTCGCAGGCCCACAGCTGGGGGATGCAGGTGGAGC | |
| | AGATGGCTCGGATGAGT | 3670 |
| | ACTCATCCGAGCCATCT | 3671 |
| Hypercholesterolaemia | TGTGGGCCTGCGACAACGACCCCGACTGCGAAGATGGCTCG | 3672 |
| Cys163Tyr | GATGAGTGGCCGCAGCGCTGTAGGGGTCTTTACGTGTTCCAA | |
| TGT-TAT | GGGGACAGTAGCCCCTGCTCGGCCTTCGAGTTCCACTG | |
| | CAGTGGAACTCGAAGGCCGAGCAGGGGCTACTGTCCCCTTG | 3673 |
| | GAACACGTAAAGACCCCTACAGCGCTGCGGCCACTCATCCG | |
| | AGCCATCTTCGCAGTCGGGGTCGTTGTCGCAGGCCCACA | |
| | GCAGCGCTGTAGGGGTC | 3674 |
| | GACCCCTACAGCGCTGC | 3675 |
| Hypercholesterolaemia | CAACGACCCCGACTGCGAAGATGGCTCGGATGAGTGGCCGC | 3676 |
| Tyr167Term | AGCGCTGTAGGGGTCTTTACGTGTTCCAAGGGGACAGTAGC | |
| TACg-TAG | CCCTGCTCGGCCTTCGAGTTCCACTGCCTAAGTGGCGAG | |
| | CTCGCCACTTAGGCAGTGGAACTCGAAGGCCGAGCAGGGGC | 3677 |
| | TACTGTCCCCTTGGAACACGTAAAGACCCCTACAGCGCTGCG | |
| | GCCACTCATCCGAGCCATCTTCGCAGTCGGGGTCGTTG | |
| | GGTCTTTACGTGTTCCA | 3678 |
| | TGGAACACGTAAAGACC | 3679 |
| Hypercholesterolaemia | CCCGACTGCGAAGATGGCTCGGATGAGTGGCCGCAGCGCTG | 3680 |
| Gln170Term | TAGGGGTCTTTACGTGTTCCAAGGGGACAGTAGCCCCTGCTC | |
| cCAA-TAA | GGCCTTCGAGTTCCACTGCCTAAGTGGCGAGTGCATCC | |
| | GGATGCACTCGCCACTTAGGCAGTGGAACTCGAAGGCCGAG | 3681 |
| | CAGGGGCTACTGTCCCCTTGGAACACGTAAAGACCCCTACAG | |
| | CGCTGCGGCCACTCATCCGAGCCATCTTCGCAGTCGGG | |
| | ACGTGTTCCAAGGGGAC | 3682 |
| | GTCCCCTTGGAACACGT | 3683 |
| Hypercholesterolaemia | CGGATGAGTGGCCGCAGCGCTGTAGGGGTCTTTACGTGTTC | 3684 |
| Cys176Phe | CAAGGGGACAGTAGCCCCTGCTCGGCCTTCGAGTTCCACTG | |
| TGC-TTC | CCTAAGTGGCGAGTGCATCCACTCCAGCTGGCGCTGTGA | |
| | TCACAGCGCCAGCTGGAGTGGATGCACTCGCCACTTAGGCA | 3685 |
| | GTGGAACTCGAAGGCCGAGCAGGGGCTACTGTCCCCTTGGA | |
| | ACACGTAAAGACCCCTACAGCGCTGCGGCCACTCATCCG | |
| | TAGCCCCTGCTCGGCCT | 3686 |
| | AGGCCGAGCAGGGGCTA | 3687 |
| Hypercholesterolaemia | CGGATGAGTGGCCGCAGCGCTGTAGGGGTCTTTACGTGTTC | 3688 |
| Cys176Tyr | CAAGGGGACAGTAGCCCCTGCTCGGCCTTCGAGTTCCACTG | |
| TGC-TAC | CCTAAGTGGCGAGTGCATCCACTCCAGCTGGCGCTGTGA | |
| | TCACAGCGCCAGCTGGAGTGGATGCACTCGCCACTTAGGCA | 3689 |
| | GTGGAACTCGAAGGCCGAGCAGGGGCTACTGTCCCCTTGGA | |
| | ACACGTAAAGACCCCTACAGCGCTGCGGCCACTCATCCG | |
| | TAGCCCCTGCTCGGCCT | 3690 |
| | AGGCCGAGCAGGGGCTA | 3691 |
| Hypercholesterolaemia | ATGAGTGGCCGCAGCGCTGTAGGGGTCTTTACGTGTTCCAAG | 3692 |
| Ser177Leu | GGGACAGTAGCCCCTGCTCGGCCTTCGAGTTCCACTGCCTAA | |
| TCG-TTG | GTGGCGAGTGCATCCACTCCAGCTGGCGCTGTGATGG | |
| | CCATCACAGCGCCAGCTGGAGTGGATGCACTCGCCACTTAG | 3693 |
| | GCAGTGGAACTCGAAGGCCGAGCAGGGGCTACTGTCCCCTT | |
| | GGAACACGTAAAGACCCCTACAGCGCTGCGGCCACTCAT | |
| | CCCCTGCTCGGCCTTCG | 3694 |
| | CGAAGGCCGAGCAGGGG | 3695 |
| Hypercholesterolaemia | TACGTGTTCCAAGGGGACAGTAGCCCCTGCTCGGCCTTCGA | 3696 |
| Glu187Lys | GTTCCACTGCCTAAGTGGCGAGTGCATCCACTCCAGCTGGC | |
| cGAG-AAG | GCTGTGATGGTGGCCCCGACTGCAAGGACAAATCTGACG | |
| | CGTCAGATTTGTCCTTGCAGTCGGGGCCACCATCACAGCGCC | 3697 |
| | AGCTGGAGTGGATGCACTCGCCACTTAGGCAGTGGAACTCG | |
| | AAGGCCGAGCAGGGGCTACTGTCCCCTTGGAACACGTA | |
| | TAAGTGGCGAGTGCATC | 3698 |
| | GATGCACTCGCCACTTA | 3699 |
| Hypercholesterolaemia | CAAGGGGACAGTAGCCCCTGCTCGGCCTTCGAGTTCCACTG | 3700 |
| His190Tyr | CCTAAGTGGCGAGTGCATCCACTCCAGCTGGCGCTGTGATG | |
| cCAC-TAC | GTGGCCCCGACTGCAAGGACAAATCTGACGAGGAAAACT | |
| | AGTTTTCCTCGTCAGATTTGTCCTTGCAGTCGGGGCCACCAT | 3701 |
| | CACAGCGCCAGCTGGAGTGGATGCACTCGCCACTTAGGCAG | |
| | TGGAACTCGAAGGCCGAGCAGGGGCTACTGTCCCCTTG | |
| | AGTGCATCCACTCCAGC | 3702 |
| | GCTGGAGTGGATGCACT | 3703 |
| Hypercholesterolaemia | CCTTCGAGTTCCACTGCCTAAGTGGCGAGTGCATCCACTCCA | 3704 |
| Gly198Asp | GCTGGCGCTGTGATGGTGGCCCCGACTGCAAGGACAAATCT | |
| GGC-GAC | GACGAGGAAAACTGCGGTATGGGCGGGGCCAGGGTGGG | |
| | CCCACCCTGGCCCCGCCCATACCGCAGTTTTCCTCGTCAGAT | 3705 |
| | TTGTCCTTGCAGTCGGGGCCACCATCACAGCGCCAGCTGGA | |
| | GTGGATGCACTCGCCACTTAGGCAGTGGAACTCGAAGG | |
| | TGATGGTGGCCCCGACT | 3706 |
| | AGTCGGGGCCACCATCA | 3707 |
| Hypercholesterolaemia | GAGTTCCACTGCCTAAGTGGCGAGTGCATCCACTCCAGCTGG | 3708 |
| Asp200Asn | CGCTGTGATGGTGGCCCCGACTGCAAGGACAAATCTGACGA | |
| cGAC-AAC | GGAAAACTGCGGTATGGGCGGGGCCAGGGTGGGGGCGG | |
| | CCGCCCCCACCCTGGCCCCGCCCATACCGCAGTTTTCCTCG | 3709 |
| | TCAGATTTGTCCTTGCAGTCGGGGCCACCATCACAGCGCCAG | |
| | CTGGAGTGGATGCACTCGCCACTTAGGCAGTGGAACTC | |
| | GTGGCCCCGACTGCAAG | 3710 |
| | CTTGCAGTCGGGGCCAC | 3711 |
| Hypercholesterolaemia | AGTTCCACTGCCTAAGTGGCGAGTGCATCCACTCCAGCTGGC | 3712 |
| Asp200Gly | GCTGTGATGGTGGCCCCGACTGCAAGGACAAATCTGACGAG | |
| GAC-GGC | GAAAACTGCGGTATGGGCGGGGCCAGGGTGGGGGCGGG | |
| | CCCGCCCCCACCCTGGCCCCGCCCATACCGCAGTTTTCCTC | 3713 |
| | GTCAGATTTGTCCTTGCAGTCGGGGCCACCATCACAGCGCCA | |
| | GCTGGAGTGGATGCACTCGCCACTTAGGCAGTGGAACT | |
| | TGGCCCCGACTGCAAGG | 3714 |
| | CCTTGCAGTCGGGGCCA | 3715 |
| Hypercholesterolaemia | GAGTTCCACTGCCTAAGTGGCGAGTGCATCCACTCCAGCTGG | 3716 |
| Asp200Tyr | NCGCTGTGATGGTGGCCCCGACTGCAAGGACAAATCTGACGA | |
| cGAC-TAC | GGAAAACTGCGGTATGGGCGGGGCCAGGGTGGGGGCGG | |
| | CCGCCCCCACCCTGGCCCCGCCCATACCGCAGTTTTCCTCGT | 3717 |
| | CAGATTTGTCCTTGCAGTCGGGGCCACCATCACAGCGCCAG | |
| | CTGGAGTGGATGCACTCGCCACTTAGGCAGTGGAACTC | |
| | GTGGCCCCGACTGCAAG | 3718 |
| | CTTGCAGTCGGGGCCAC | 3719 |
| Hypercholesterolaemia | CCACTGCCTAAGTGGCGAGTGCATCCACTCCAGCTGGCGCT | 3720 |
| Cys201Term | GTGATGGTGGCCCCGACTGCAAGGACAAATCTGACGAGGAA | |
| TGCa-TGA | AACTGCGGTATGGGCGGGGCCAGGGTGGGGGCGGGGCGT | |
| | ACGCCCCGCCCCCACCCTGGCCCCGCCCATACCGCAGTTTT | 3721 |
| | CCTCGTCAGATTTGTCCTTGCAGTCGGGGCCACCATCACAGC | |
| | GCCAGCTGGAGTGGATGCACTCGCCACTTAGGCAGTGG | |
| | CCCGACTGCAAGGACAA | 3722 |
| | TTGTCCTTGCAGTCGGG | 3723 |
| Hypercholesterolaemia | TCCACTGCCTAAGTGGCGAGTGCATCCACTCCAGCTGGCGCT | 3724 |
| Cys201Tyr | GTGATGGTGGCCCCGACTGCAAGGACAAATCTGACGAGGAA | |
| TGC-TAC | AACTGCGGTATGGGCGGGGCCAGGGTGGGGGCGGGGCG | |
| | CGCCCCGCCCCCACCCTGGCCCCGCCCATACCGCAGTTTTC | 3725 |
| | CTCGTCAGATTTGTCCTTGCAGTCGGGGCCACCATCACAGCG | |
| | CCAGCTGGAGTGGATGCACTCGCCACTTAGGCAGTGGA | |
| | CCCCGACTGCAAGGACA | 3726 |
| | TGTCCTTGCAGTCGGGG | 3727 |
| Hypercholesterolaemia | TGCCTAAGTGGCGAGTGCATCCACTCCAGCTGGCGCTGTGAT | 3728 |
| Asp203Asn | GGTGGCCCCGACTGCAAGGACAAATCTGACGAGGAAAACTG | |
| gGAC-AAC | CGGTATGGGCGGGGCCAGGGTGGGGGCGGGGCGTCCTA | |
| | TAGGACGCCCCGCCCCCACCCTGGCCCCGCCCATACCGCAG | 3729 |
| | TTTTCCTCGTCAGATTTGTCCTTGCAGTCGGGGCCACCATCA | |
| | CAGCGCCAGCTGGAGTGGATGCACTCGCCACTTAGGCA | |
| | ACTGCAAGGACAAATCT | 3730 |
| | AGATTTGTCCTTGCAGT | 3731 |
| Hypercholesterolaemia | GCCTAAGTGGCGAGTGCATCCACTCCAGCTGGCGCTGTGAT | 3732 |
| Asp203Gly | GGTGGCCCCGACTGCAAGGACAAATCTGACGAGGAAAACTG | |
| GAC-GGC | CGGTATGGGCGGGGCCAGGGTGGGGGCGGGGCGTCCTAT | |
| | ATAGGACGCCCCGCCCCCACCCTGGCCCCGCCCATACCGCA | 3733 |
| | GTTTTCCTCGTCAGATTTGTCCTTGCAGTCGGGGCCACCATC | |
| | ACAGCGCCAGCTGGAGTGGATGCACTCGCCACTTAGGC | |
| | CTGCAAGGACAAATCTG | 3734 |
| | CAGATTTGTCCTTGCAG | 3735 |
| Hypercholesterolaemia | GCCTAAGTGGCGAGTGCATCCACTCCAGCTGGCGCTGTGAT | 3736 |
| Asp203Val | GGTGGCCCCGACTGCAAGGACAAATCTGACGAGGAAAACTG | |
| GAC-GTC | CGGTATGGGCGGGGCCAGGGTGGGGGCGGGGCGTCCTAT | |
| | ATAGGACGCCCCGCCCCCACCCTGGCCCCGCCCATACCGCA | 3737 |
| | GTTTTCCTCGTCAGATTTGTCCTTGCAGTCGGGGCCACCATC | |
| | ACAGCGCCAGCTGGAGTGGATGCACTCGCCACTTAGGC | |
| | CTGCAAGGACAAATCTG | 3738 |
| | CAGATTTGTCCTTGCAG | 3739 |
| Hypercholesterolaemia | AGTGGCGAGTGCATCCACTCCAGCTGGCGCTGTGATGGTGG | 3740 |
| Ser205Pro | CCCCGACTGCAAGGACAAATCTGACGAGGAAAACTGCGGTAT | |
| aTCT-CCT | GGGCGGGGCCAGGGTGGGGGCGGGGCGTCCTATCACCT | |
| | AGGTGATAGGACGCCCCGCCCCCACCCTGGCCCCGCCCATA | 3741 |
| | CCGCAGTTTTCCTCGTCAGATTTGTCCTTGCAGTCGGGGCCA | |
| | CCATCACAGCGCCAGCTGGAGTGGATGCACTCGCCACT | |
| | AGGACAAATCTGACGAG | 3742 |
| | CTCGTCAGATTTGTCCT | 3743 |
| Hypercholesterolaemia | CGAGTGCATCCACTCCAGCTGGCGCTGTGATGGTGGCCCCG | 3744 |
| Asp206Glu | ACTGCAAGGACAAATCTGACGAGGAAAACTGCGGTATGGGC | |
| GACg-GAG | GGGGCCAGGGTGGGGGCGGGGCGTCCTATCACCTGTCCC | |
| | GGGACAGGTGATAGGACGCCCCGCCCCCACCCTGGCCCCG | 3745 |
| | CCCATACCGCAGTTTTCCTCGTCAGATTTGTCCTTGCAGTCG | |
| | GGGCCACCATCACAGCGCCAGCTGGAGTGGATGCACTCG | |
| | AAATCTGACGAGGAAAA | 3746 |
| | TTTTCCTCGTCAGATTT | 3747 |
| Hypercholesterolaemia | GAGTGCATCCACTCCAGCTGGCGCTGTGATGGTGGCCCCGA | 3748 |
| Glu207Gln | CTGCAAGGACAAATCTGACGAGGAAAACTGCGGTATGGGCG | |
| cGAG-CAG | GGGCCAGGGTGGGGGCGGGGCGTCCTATCACCTGTCCCT | |
| | AGGGACAGGTGATAGGACGCCCCGCCCCCACCCTGGCCCC | 3749 |
| | GCCCATACCGCAGTTTTCCTCGTCAGATTTGTCCTTGCAGTC | |
| | GGGGCCACCATCACAGCGCCAGCTGGAGTGGATGCACTC | |
| | AATCTGACGAGGAAAAC | 3750 |
| | GTTTTCCTCGTCAGATT | 3751 |
| Hypercholesterolaemia | GAGTGCATCCACTCCAGCTGGCGCTGTGATGGTGGCCCCGA | 3752 |
| Glu207Lys | CTGCAAGGACAAATCTGACGAGGAAAACTGCGGTATGGGCG | |
| cGAG-AAG | GGGCCAGGGTGGGGGCGGGGCGTCCTATCACCTGTCCCT | |
| | AGGGACAGGTGATAGGACGCCCCGCCCCCACCCTGGCCCC | 3753 |
| | GCCCATACCGCAGTTTTCCTCGTCAGATTTGTCCTTGCAGTC | |
| | GGGGCCACCATCACAGCGCCAGCTGGAGTGGATGCACTC | |
| | AATCTGACGAGGAAAAC | 3754 |
| | GTTTTCCTCGTCAGATT | 3755 |
| Hypercholesterolaemia | GAGTGCATCCACTCCAGCTGGCGCTGTGATGGTGGCCCCGA | 3756 |
| Glu207Term | CTGCAAGGACAAATCTGACGAGGAAAACTGCGGTATGGGCG | |
| cGAG-TAG | GGGCCAGGGTGGGGGCGGGGCGTCCTATCACCTGTCCCT | |
| | AGGGACAGGTGATAGGACGCCCCGCCCCCACCCTGGCCCC | 3757 |
| | GCCCATACCGCAGTTTTCCTCGTCAGATTTGTCCTTGCAGTC | |
| | GGGGCCACCATCACAGCGCCAGCTGGAGTGGATGCACTC | |
| | AATCTGACGAGGAAAAC | 3758 |
| | GTTTTCCTCGTCAGATT | 3759 |
| Hypercholesterolaemia | TCTTGAGAAAATCAACACACTCTGTCCTGTTTTCCAGCTGTGG | 3760 |
| Glu219Lys | CCACCTGTCGCCCTGACGAATTCCAGTGCTCTGATGGAAACT | |
| cGAA-AAA | GCATCCATGGCAGCCGGCAGTGTGACCGGGAATATG | |
| | CATATTCCCGGTCACACTGCCGGCTGCCATGGATGCAGTTTC | 3761 |
| | CATCAGAGCACTGGAATTCGTCAGGGCGACAGGTGGCCACA | |
| | GCTGGAAAACAGGACAGAGTGTGTTGATTTTCTCAAGA | |
| | GCCCTGACGAATTCCAG | 3762 |
| | CTGGAATTCGTCAGGGC | 3763 |
| Hypercholesterolaemia | GAAAATCAACACACTCTGTCCTGTTTTCCAGCTGTGGCCACCT | 3764 |
| Gln221Term | GTCGCCCTGACGAATTCCAGTGCTCTGATGGAAACTGCATCC | |
| cCAG-TAG | ATGGCAGCCGGCAGTGTGACCGGGAATATGACTGCA | |
| | TGCAGTCATATTCCCGGTCACACTGCCGGCTGCCATGGATGC | 3765 |
| | AGTTTCCATCAGAGCACTGGAATTCGTCAGGGCGACAGGTGG | |
| | CCACAGCTGGAAAACAGGACAGAGTGTGTTGATTTTC | |
| | ACGAATTCCAGTGCTCT | 3766 |
| | AGAGCACTGGAATTCGT | 3767 |
| Hypercholesterolaemia | CCTGTTTTCCAGCTGTGGCCACCTGTCGCCCTGACGAATTCC | 3768 |
| Cys227Phe | AGTGCTCTGATGGAAACTGCATCCATGGCAGCCGGCAGTGT | |
| TGC-TTC | GACCGGGAATATGACTGCAAGGACATGAGCGATGAAGT | |
| | ACTTCATCGCTCATGTCCTTGCAGTCATATTCCCGGTCACACT | 3769 |
| | GCCGGCTGCCATGGATGCAGTTTCCATCAGAGCACTGGAATT | |
| | CGTCAGGGCGACAGGTGGCCACAGCTGGAAAACAGG | |
| | TGGAAACTGCATCCATG | 3770 |
| | CATGGATGCAGTTTCCA | 3771 |
| Hypercholesterolaemia | TCGCCCTGACGAATTCCAGTGCTCTGATGGAAACTGCATCCA | 3772 |
| Asp235Glu | TGGCAGCCGGCAGTGTGACCGGGAATATGACTGCAAGGACA | |
| GACc-GAA | TGAGCGATGAAGTTGGCTGCGTTAATGGTGAGCGCTGG | |
| | CCAGCGCTCACCATTAACGCAGCCAACTTCATCGCTCATGTC | 3773 |
| | CTTGCAGTCATATTCCCGGTCACACTGCCGGCTGCCATGGAT | |
| | GCAGTTTCCATCAGAGCACTGGAATTCGTCAGGGCGA | |
| | CAGTGTGACCGGGAATA | 3774 |
| | TATTCCCGGTCACACTG | 3775 |
| Hypercholesterolaemia | GTCGCCCTGACGAATTCCAGTGCTCTGATGGAAACTGCATCC | 3176 |
| Asp235Gly | ATGGCAGCCGGCAGTGTGACCGGGAATATGACTGCAAGGAC | |
| GAC-GGC | ATGAGCGATGAAGTTGGCTGCGTTAATGGTGAGCGCTG | |
| | CAGCGCTCACCATTAACGCAGCCAACTTCATCGCTCATGTCC | 3777 |
| | TTGCAGTCATATTCCCGGTCACACTGCCGGCTGCCATGGATG | |
| | CAGTTTCCATCAGAGCACTGGAATTCGTCAGGGCGAC | |
| | GCAGTGTGACCGGGAAT | 3778 |
| | ATTCCCGGTCACACTGC | 3779 |
| Hypercholesterolaemia | CCTGACGAATTCCAGTGCTCTGATGGAAACTGCATCCATGGC | 3780 |
| Glu237Lys | AGCCGGCAGTGTGACCGGGAATATGACTGCAAGGACATGAG | |
| gGAA-AAA | CGATGAAGTTGGCTGCGTTAATGGTGAGCGCTGGCCAT | |
| | ATGGCCAGCGCTCACCATTAACGCAGCCAACTTCATCGCTCA | 3781 |
| | TGTCCTTGCAGTCATATTCCCGGTCACACTGCCGGCTGCCAT | |
| | GGATGCAGTTTCCATCAGAGCACTGGAATTCGTCAGG | |
| | GTGACCGGGAATATGAC | 3782 |
| | GTCATATTCCCGGTCAC | 3783 |
| Hypercholesterolaemia | TCCAGTGCTCTGATGGAAACTGCATCCATGGCAGCCGGCAGT | 3784 |
| Cys240Phe | GTGACCGGGAATATGACTGCAAGGACATGAGCGATGAAGTT | |
| TGC-TTC | GGCTGCGTTAATGGTGAGCGCTGGCCATCTGGTTTTCC | |
| | GGAAAACCAGATGGCCAGCGCTCACCATTAACGCAGCCAACT | 3785 |
| | TCATCGCTCATGTCCTTGCAGTCATATTCCCGGTCACACTGCC | |
| | GGCTGCCATGGATGCAGTTTCCATCAGAGCACTGGA | |
| | ATATGACTGCAAGGACA | 3786 |
| | TGTCCTTGCAGTCATAT | 3787 |
| Hypercholesterolaemia | AAACTGCATCCATGGCAGCCGGCAGTGTGACCGGGAATATG | 3788 |
| Asp245Glu | ACTGCAAGGACATGAGCGATGAAGTTGGCTGCGTTAATGGTG | |
| GATg-GAA | AGCGCTGGCCATCTGGTTTTCCATCCCCCATTCTCTGT | |
| | ACAGAGAATGGGGGATGGAAAACCAGATGGCCAGCGCTCAC | 3789 |
| | CATTAACGCAGCCAACTTCATCGCTCATGTCCTTGCAGTCATA | |
| | TTCCCGGTCACACTGCCGGCTGCCATGGATGCAGTTT | |
| | ATGAGCGATGAAGTTGG | 3790 |
| | CCAACTTCATCGCTCAT | 3791 |
| Hypercholesterolaemia | ATGGCAGCCGGCAGTGTGACCGGGAATATGACTGCAAGGAC | 3792 |
| Cys249Tyr | ATGAGCGATGAAGTTGGCTGCGTTAATGGTGAGCGCTGGCC | |
| TGC-TAC | ATCTGGTTTTCCATCCCCCATTCTCTGTGCCTTGCTGCT | |
| | AGCAGCAAGGCACAGAGAATGGGGGATGGAAAACCAGATGG | 3793 |
| | CCAGCGCTCACCATTAACGCAGCCAACTTCATCGCTCATGTC | |
| | CTTGCAGTCATATTCCCGGTCACACTGCCGGCTGCCAT | |
| | AGTTGGCTGCGTTAATG | 3794 |
| | CATTAACGCAGCCAACT | 3795 |
| Hypercholesterolaemia | AGGCTCAGACACACCTGACCTTCCTCCTTCCTCTCTCTGGCT | 3796 |
| Glu256Lys | CTCACAGTGACACTCTGCGAGGGACCCAACAAGTTCAAGTGT | |
| cGAG-AAG | CACAGCGGCGAATGCATCACCCTGGACAAAGTCTGCA | |
| | TGCAGACTTTGTCCAGGGTGATGCATTCGCCGCTGTGACACT | 3797 |
| | TGAACTTGTTGGGTCCCTCGCAGAGTGTCACTGTGAGAGCCA | |
| | GAGAGAGGAAGGAGGAAGGTCAGGTGTGTCTGAGCCT | |
| | CACTCTGCGAGGGACCC | 3798 |
| | GGGTCCCTCGCAGAGTG | 3799 |
| Hypercholesterolaemia | CCTCTCTCTGGCTCTCACAGTGACACTCTGCGAGGGACCCAA | 3800 |
| Ser265Arg | CAAGTTCAAGTGTCACAGCGGCGAATGCATCACCCTGGACAA | |
| AGCg-AGA | AGTCTGCAACATGGCTAGAGACTGCCGGGACTGGTCA | |
| | TGACCAGTCCCGGCAGTCTCTAGCCATGTTGCAGACTTTGTC | 3801 |
| | CAGGGTGATGCATTCGCCGCTGTGACACTTGAACTTGTTGGG | |
| | TCCCTCGCAGAGTGTCACTGTGAGAGCCAGAGAGAGG | |
| | TGTCACAGCGGCGAATG | 3802 |
| | CATTCGCCGCTGTGACA | 3803 |
| Hypercholesterolaemia | TCTCTGGCTCTCACAGTGACACTCTGCGAGGGACCCAACAAG | 3804 |
| Glu267Lys | TTCAAGTGTCACAGCGGCGAATGCATCACCCTGGACAAAGTC | |
| cGAA-AAA | TGCAACATGGCTAGAGACTGCCGGGACTGGTCAGATG | |
| | CATCTGACCAGTCCCGGCAGTCTCTAGCCATGTTGCAGACTT | 3805 |
| | TGTCCAGGGTGATGCATTCGCCGCTGTGACACTTGAACTTGT | |
| | TGGGTCCCTCGCAGAGTGTCACTGTGAGAGCCAGAGA | |
| | ACAGCGGCGAATGCATC | 3806 |
| | GATGCATTCGCCGCTGT | 3807 |
| Hypercholesterolaemia | TCTCTGGCTCTCACAGTGACACTCTGCGAGGGACCCAACAAG | 3808 |
| Glu267Term | TTCAAGTGTCACAGCGGCGAATGCATCACCCTGGACAAAGTC | |
| cGAA-TAA | TGCAACATGGCTAGAGACTGCCGGGACTGGTCAGATG | |
| | CATCTGACCAGTCCCGGCAGTCTCTAGCCATGTTGCAGACTT | 3809 |
| | TGTCCAGGGTGATGCATTCGCCGCTGTGACACTTGAACTTGT | |
| | TGGGTCCCTCGCAGAGTGTCACTGTGAGAGCCAGAGA | |
| | ACAGCGGCGAATGCATC | 3810 |
| | GATGCATTCGCCGCTGT | 3811 |
| Hypercholesterolaemia | ACACTCTGCGAGGGACCCAACAAGTTCAAGTGTCACAGCGG | 3812 |
| Lys273Glu | CGAATGCATCACCCTGGACAAAGTCTGCAACATGGCTAGAGA | |
| cAAA-GAA | CTGCCGGGACTGGTCAGATGAACCCATCAAAGAGTGCG | |
| | CGCACTCTTTGATGGGTTCATCTGACCAGTCCCGGCAGTCTC | 3813 |
| | TAGCCATGTTGCAGACTTTGTCCAGGGTGATGCATTCGCCGC | |
| | TGTGACACTTGAACTTGTTGGGTCCCTCGCAGAGTGT | |
| | CCCTGGACAAAGTCTGC | 3814 |
| | GCAGACTTTGTCCAGGG | 3815 |
| Hypercholesterolaemia | CGAGGGACCCAACAAGTTCAAGTGTCACAGCGGCGAATGCA | 3816 |
| Cys275Term | TCACCCTGGACAAAGTCTGCAACATGGCTAGAGACTGCCGG | |
| TGCa-TGA | GACTGGTCAGATGAACCCATCAAAGAGTGCGGTGAGTCT | |
| | AGACTCACCGCACTCTTTGATGGGTTCATCTGACCAGTCCCG | 3817 |
| | GCAGTCTCTAGCCATGTTGCAGACTTTGTCCAGGGTGATGCA | |
| | TTCGCCGCTGTGACACTTGAACTTGTTGGGTCCCTCG | |
| | AAAGTCTGCAACATGGC | 3818 |
| | GCCATGTTGCAGACTTT | 3819 |
| Hypercholesterolaemia | AGTTCAAGTGTCACAGCGGCGAATGCATCACCCTGGACAAAG | 3820 |
| Asp280Gly | TCTGCAACATGGCTAGAGACTGCCGGGACTGGTCAGATGAA | |
| GAC-GGC | CCCATCAAAGAGTGCGGTGAGTCTCGGTGCAGGCGGCT | |
| | AGCCGCCTGCACCGAGACTCACCGCACTCTTTGATGGGTTCA | 3821 |
| | TCTGACCAGTCCCGGCAGTCTCTAGCCATGTTGCAGACTTTG | |
| | TCCAGGGTGATGCATTCGCCGCTGTGACACTTGAACT | |
| | GGCTAGAGACTGCCGGG | 3822 |
| | CCCGGCAGTCTCTAGCC | 3823 |
| Hypercholesterolaemia | TCAAGTGTCACAGCGGCGAATGCATCACCCTGGACAAAGTCT | 3824 |
| Cys281Tyr | GCAACATGGCTAGAGACTGCCGGGACTGGTCAGATGAACCC | |
| TGC-TAC | ATCAAAGAGTGCGGTGAGTCTCGGTGCAGGCGGCTTGC | |
| | GCAAGCCGCCTGCACCGAGACTCACCGCACTCTTTGATGGG | 3825 |
| | TTCATCTGACCAGTCCCGGCAGTCTCTAGCCATGTTGCAGAC | |
| | TTTGTCCAGGGTGATGCATTCGCCGCTGTGACACTTGA | |
| | TAGAGACTGCCGGGACT | 3826 |
| | AGTCCCGGCAGTCTCTA | 3827 |
| Hypercholesterolaemia | TGTCACAGCGGCGAATGCATCACCCTGGACAAAGTCTGCAAC | 3828 |
| Asp283Asn | ATGGCTAGAGACTGCCGGGACTGGTCAGATGAACCCATCAAA | |
| gGAC-AAC | GAGTGCGGTGAGTCTCGGTGCAGGCGGCTTGCAGAGT | |
| | ACTCTGCAAGCCGCCTGCACCGAGACTCACCGCACTCTTTGA | 3829 |
| | TGGGTTCATCTGACCAGTCCCGGCAGTCTCTAGCCATGTTGC | |
| | AGACTTTGTCCAGGGTGATGCATTCGCCGCTGTGACA | |
| | ACTGCCGGGACTGGTCA | 3830 |
| | TGACCAGTCCCGGCAGT | 3831 |
| Hypercholesterolaemia | TCACAGCGGCGAATGCATCACCCTGGACAAAGTCTGCAACAT | 3832 |
| Asp283Glu | GGCTAGAGACTGCCGGGACTGGTCAGATGAACCCATCAAAG | |
| GACt-GAG | AGTGCGGTGAGTCTCGGTGCAGGCGGCTTGCAGAGTTT | |
| | AAACTCTGCAAGCCGCCTGCACCGAGACTCACCGCACTCTTT | 3833 |
| | GATGGGTTCATCTGACCAGTCCCGGCAGTCTCTAGCCATGTT | |
| | GCAGACTTTGTCCAGGGTGATGCATTCGCCGCTGTGA | |
| | TGCCGGGACTGGTCAGA | 3834 |
| | TCTGACCAGTCCCGGCA | 3835 |
| Hypercholesterolaemia | TGTCACAGCGGCGAATGCATCACCCTGGACAAAGTCTGCAAC | 3836 |
| Asp283Tyr | ATGGCTAGAGACTGCCGGGACTGGTCAGATGAACCCATCAAA | |
| gGAC-TAC | GAGTGCGGTGAGTCTCGGTGCAGGCGGCTTGCAGAGT | |
| | ACTCTGCAAGCCGCCTGCACCGAGACTCACCGCACTCTTTGA | 3837 |
| | TGGGTTCATCTGACCAGTCCCGGCAGTCTCTAGCCATGTTGC | |
| | AGACTTTGTCCAGGGTGATGCATTCGCCGCTGTGACA | |
| | ACTGCCGGGACTGGTCA | 3838 |
| | TGACCAGTCCCGGCAGT | 3839 |
| Hypercholesterolaemia | CAGCGGCGAATGCATCACCCTGGACAAAGTCTGCAACATGG | 3840 |
| Trp284Term | CTAGAGACTGCCGGGACTGGTCAGATGAACCCATCAAAGAGT | |
| TGGt-TGA | GCGGTGAGTCTCGGTGCAGGCGGCTTGCAGAGTTTGTG | |
| | CACAAACTCTGCAAGCCGCCTGCACCGAGACTCACCGCACTC | 3841 |
| | TTTGATGGGTTCATCTGACCAGTCCCGGCAGTCTCTAGCCAT | |
| | GTTGCAGACTTTGTCCAGGGTGATGCATTCGCCGCTG | |
| | CGGGACTGGTCAGATGA | 3842 |
| | TCATCTGACCAGTCCCG | 3843 |
| Hypercholesterolaemia | GCGGCGAATGCATCACCCTGGACAAAGTCTGCAACATGGCTA | 3844 |
| Ser285Leu | GAGACTGCCGGGACTGGTCAGATGAACCCATCAAAGAGTGC | |
| TCA-TTA | GGTGAGTCTCGGTGCAGGCGGCTTGCAGAGTTTGTGGG | |
| | CCCACAAACTCTGCAAGCCGCCTGCACCGAGACTCACCGCA | 3845 |
| | CTCTTTGATGGGTTCATCTGACCAGTCCCGGCAGTCTCTAGC | |
| | CATGTTGCAGACTTTGTCCAGGGTGATGCATTCGCCGC | |
| | GGACTGGTCAGATGAAC | 3846 |
| | GTTCATCTGACCAGTCC | 3847 |
| Hypercholesterolaemia | CCCTGGACAAAGTCTGCAACATGGCTAGAGACTGCCGGGAC | 3848 |
| Lys290Arg | TGGTCAGATGAACCCATCAAAGAGTGCGGTGAGTCTCGGTG | |
| AAA-AGA | CAGGCGGCTTGCAGAGTTTGTGGGGAGCCAGGAAAGGGA | |
| | TCCCTTTCCTGGCTCCCCACAAACTCTGCAAGCCGCCTGCAC | 3849 |
| | CGAGACTCACCGCACTCTTTGATGGGTTCATCTGACCAGTCC | |
| | CGGCAGTCTCTAGCCATGTTGCAGACTTTGTCCAGGG | |
| | ACCCATCAAAGAGTGCG | 3850 |
| | CGCACTCTTTGATGGGT | 3851 |
| Hypercholesterolaemia | GGGTAGGGGCCCGAGAGTGACCAGTCTGCATCCCCTGGCCC | 3852 |
| Cys297Phe | TGCGCAGGGACCAACGAATGCTTGGACAACAACGGCGGCTG | |
| TGC-TTC | TTCCCACGTCTGCAATGACCTTAAGATCGGCTACGAGTG | |
| | CACTCGTAGCCGATCTTAAGGTCATTGCAGACGTGGGAACAG | 3853 |
| | CCGCCGTTGTTGTCCAAGCATTCGTTGGTCCCTGCGCAGGGC | |
| | CAGGGGATGCAGACTGGTCACTCTCGGGCCCCTACCC | |
| | CAACGAATGCTTGGACA | 3854 |
| | TGTCCAAGCATTCGTTG | 3855 |
| Hypercholesterolaemia | GGGTAGGGGCCCGAGAGTGACCAGTCTGCATCCCCTGGCCC | 3856 |
| Cys297Tyr | TGCGCAGGGACCAACGAATGCTTGGACAACAACGGCGGCTG | |
| TGC-TAC | TTCCCACGTCTGCAATGACCTTAAGATCGGCTACGAGTG | |
| | CACTCGTAGCCGATCTTAAGGTCATTGCAGACGTGGGAACAG | 3857 |
| | CCGCCGTTGTTGTCCAAGCATTCGTTGGTCCCTGCGCAGGGC | |
| | CAGGGGATGCAGACTGGTCACTCTCGGGCCCCTACCC | |
| | CAACGAATGCTTGGACA | 3858 |
| | TGTCCAAGCATTCGTTG | 3859 |
| Hypercholesterolaemia | TGCATCCCCTGGCCCTGCGCAGGGACCAACGAATGCTTGGA | 3860 |
| His306Tyr | CAACAACGGCGGCTGTTCCCACGTCTGCAATGACCTTAAGAT | |
| cCAC-TAC | CGGCTACGAGTGCCTGTGCCCCGACGGCTTCCAGCTGG | |
| | CCAGCTGGAAGCCGTCGGGGCACAGGCACTCGTAGCCGATC | 3861 |
| | TTAAGGTCATTGCAGACGTGGGAACAGCCGCCGTTGTTGTCC | |
| | AAGCATTCGTTGGTCCCTGCGCAGGGCCAGGGGATGCA | |
| | GCTGTTCCCACGTCTGC | 3862 |
| | GCAGACGTGGGAACAGC | 3863 |
| Hypercholesterolaemia | CCCTGGCCCTGCGCAGGGACCAACGAATGCTTGGACAACAA | 3864 |
| Cys308Gly | CGGCGGCTGTTCCCACGTCTGCAATGACCTTAAGATCGGCTA | |
| cTGC-GGC | CGAGTGCCTGTGCCCCGACGGCTTCCAGCTGGTGGCCC | |
| | GGGCCACCAGCTGGAAGCCGTCGGGGCACAGGCACTCGTA | 3865 |
| | GCCGATCTTAAGGTCATTGCAGACGTGGGAACAGCCGCCGT | |
| | TGTTGTCCAAGCATTCGTTGGTCCCTGCGCAGGGCCAGGG | |
| | CCCACGTCTGCAATGAC | 3866 |
| | GTCATTGCAGACGTGGG | 3867 |
| Hypercholesterolaemia | CCTGGCCCTGCGCAGGGACCAACGAATGCTTGGACAACAAC | 3868 |
| Cys308Tyr | GGCGGCTGTTCCCACGTCTGCAATGACCTTAAGATCGGCTAC | |
| TGC-TAC | GAGTGCCTGTGCCCCGACGGCTTCCAGCTGGTGGCCCA | |
| | TGGGCCACCAGCTGGAAGCCGTCGGGGCACAGGCACTCGTA | 3869 |
| | GCCGATCTTAAGGTCATTGCAGACGTGGGAACAGCCGCCGTT | |
| | GTTGTCCAAGCATTCGTTGGTCCCTGCGCAGGGCCAGG | |
| | CCACGTCTGCAATGACC | 3870 |
| | GGTCATTGCAGACGTGG | 3871 |
| Hypercholesterolaemia | ACCAACGAATGCTTGGACAACAACGGCGGCTGTTCCCACGTC | 3872 |
| Gly314Ser | TGCAATGACCTTAAGATCGGCTACGAGTGCCTGTGCCCCGAC | |
| cGGC-AGC | GGCTTCCAGCTGGTGGCCCAGCGAAGATGCGAAGGTG | |
| | CACCTTCGCATCTTCGCTGGGCCACCAGCTGGAAGCCGTCG | 3873 |
| | GGGCACAGGCACTCGTAGCCGATCTTAAGGTCATTGCAGAC | |
| | GTGGGAACAGCCGCCGTTGTTGTCCAAGCATTCGTTGGT | |
| | TTAAGATCGGCTACGAG | 3874 |
| | CTCGTAGCCGATCTTAA | 3875 |
| Hypercholesterolaemia | CCAACGAATGCTTGGACAACAACGGCGGCTGTTCCCACGTCT | 3876 |
| Gly314Val | GCAATGACCTTAAGATCGGCTACGAGTGCCTGTGCCCCGAC | |
| GGC-GTC | GGCTTCCAGCTGGTGGCCCAGCGAAGATGCGAAGGTGA | |
| | TCACCTTCGCATCTTCGCTGGGCCACCAGCTGGAAGCCGTCG | 3877 |
| | GGGCACAGGCACTCGTAGCCGATCTTAAGGTCATTGCAGACG | |
| | TGGGAACAGCCGCCGTTGTTGTCCAAGCATTCGTTGG | |
| | TAAGATCGGCTACGAGT | 3878 |
| | ACTCGTAGCCGATCTTA | 3879 |
| Hypercholesterolaemia | CGAATGCTTGGACAACAACGGCGGCTGTTCCCACGTCTGCAA | 3880 |
| Tyr315Term | TGACCTTAAGATCGGCTACGAGTGCCTGTGCCCCGACGGCTT | |
| TACg-TAA | CCAGCTGGTGGCCCAGCGAAGATGCGAAGGTGATTTC | |
| | GAAATCACCTTCGCATCTTCGCTGGGCCACCAGCTGGAAGCC | 3881 |
| | GTCGGGGCACAGGCACTCGTAGCCGATCTTAAGGTCATTGCA | |
| | GACGTGGGAACAGCCGCCGTTGTTGTCCAAGCATTCG | |
| | ATCGGCTACGAGTGCCT | 3882 |
| | AGGCACTCGTAGCCGAT | 3883 |
| Hypercholesterolaemia | TGCTTGGACAACAACGGCGGCTGTTCCCACGTCTGCAATGAC | 3884 |
| Cys317Gly | CTTAAGATCGGCTACGAGTGCCTGTGCCCCGACGGCTTCCA | |
| gTGC-GGC | GCTGGTGGCCCAGCGAAGATGCGAAGGTGATTTCCGGG | |
| | CCCGGAAATCACCTTCGCATCTTCGCTGGGCCACCAGCTGGA | 3885 |
| | AGCCGTCGGGGCACAGGCACTCGTAGCCGATCTTAAGGTCA | |
| | TTGCAGACGTGGGAACAGCCGCCGTTGTTGTCCAAGCA | |
| | GCTACGAGTGCCTGTGC | 3886 |
| | GCACAGGCACTCGTAGC | 3887 |
| Hypercholesterolaemia | TGCTTGGACAACAACGGCGGCTGTTCCCACGTCTGCAATGAC | 3888 |
| Cys317Ser | CTTAAGATCGGCTACGAGTGCCTGTGCCCCGACGGCTTCCA | |
| gTGC-AGC | GCTGGTGGCCCAGCGAAGATGCGAAGGTGATTTCCGGG | |
| | CCCGGAAATCACCTTCGCATCTTCGCTGGGCCACCAGCTGGA | 3889 |
| | AGCCGTCGGGGCACAGGCACTCGTAGCCGATCTTAAGGTCA | |
| | TTGCAGACGTGGGAACAGCCGCCGTTGTTGTCCAAGCA | |
| | GCTACGAGTGCCTGTGC | 3890 |
| | GCACAGGCACTCGTAGC | 3891 |
| Hypercholesterolaemia | ACAACGGCGGCTGTTCCCACGTCTGCAATGACCTTAAGATCG | 3892 |
| Pro320Arg | GCTACGAGTGCCTGTGCCCCGACGGCTTCCAGCTGGTGGCC | |
| CCC-CGC | CAGCGAAGATGCGAAGGTGATTTCCGGGTGGGACTGAG | |
| | CTCAGTCCCACCCGGAAATCACCTTCGCATCTTCG CTGGGCC | 3893 |
| | ACCAGCTGGAAGCCGTCGGGGCACAGGCACTCGTAGCCGAT | |
| | CTTAAGGTCATTGCAGACGTGGGAACAGCCGCCGTTGT | |
| | CCTGTGCCCCGACGGCT | 3894 |
| | AGCCGTCGGGGCACAGG | 3895 |
| Hypercholesterolaemia | AACGGCGGCTGTTCCCACGTCTGCAATGACCTTAAGATCGGC | 3896 |
| Asp321Asn | TACGAGTGCCTGTGCCCCGACGGCTTCCAGCTGGTGGCCCA | |
| cGAC-AAC | GCGAAGATGCGAAGGTGATTTCCGGGTGGGACTGAGCC | |
| | GGCTCAGTCCCACCCGGAAATCACCTTCGCATCTTCGCTGGG | 3897 |
| | CCACCAGCTGGAAGCCGTCGGGGCACAGGCACTCGTAGCCG | |
| | ATCTTAAGGTCATTGCAGACGTGGGAACAGCCGCCGTT | |
| | TGTGCCCCGACGGCTTC | 3898 |
| | GAAGCCGTCGGGGCACA | 3899 |
| Hypercholesterolaemia | CGGCGGCTGTTCCCACGTCTGCAATGACCTTAAGATCGGCTA | 3900 |
| Asp321Glu | CGAGTGCCTGTGCCCCGACGGCTTCCAGCTGGTGGCCCAGC | |
| GACg-GAG | GAAGATGCGAAGGTGATTTCCGGGTGGGACTGAGCCCT | |
| | AGGGCTCAGTCCCACCCGGAAATCACCTTCGCATCTTCGCTG | 3901 |
| | GGCCACCAGCTGGAAGCCGTCGGGGCACAGGCACTCGTAGC | |
| | CGATCTTAAGGTCATTGCAGACGTGGGAACAGCCGCCG | |
| | TGCCCCGACGGCTTCCA | 3902 |
| | TGGAAGCCGTCGGGGCA | 3903 |
| Hypercholesterolaemia | GGCGGCTGTTCCCACGTCTGCAATGACCTTAAGATCGGCTAC | 3904 |
| Gly322Ser | GAGTGCCTGTGCCCCGACGGCTTCCAGCTGGTGGCCCAGCG | |
| cGGC-AGC | AAGATGCGAAGGTGATTTCCGGGTGGGACTGAGCCCTG | |
| | CAGGGCTCAGTCCCACCCGGAAATCACCTTCGCATCTTCGCT | 3905 |
| | GGGCCACCAGCTGGAAGCCGTCGGGGCACAGGCACTCGTA | |
| | GCCGATCTTAAGGTCATTGCAGACGTGGGAACAGCCGCC | |
| | GCCCCGACGGCTTCCAG | 3906 |
| | CTGGAAGCCGTCGGGGC | 3907 |
| Hypercholesterolaemia | TGTTCCCACGTCTGCAATGACCTTAAGATCGGCTACGAGTGC | 3908 |
| Gln324Term | CTGTGCCCCGACGGCTTCCAGCTGGTGGCCCAGCGAAGATG | |
| cCAG-TAG | CGAAGGTGATTTCCGGGTGGGACTGAGCCCTGGGCCCC | |
| | GGGGCCCAGGGCTCAGTCCCACCCGGAAATCACCTTCGCAT | 3909 |
| | CTTCGCTGGGCCACCAGCTGGAAGCCGTCGGGGCACAGGCA | |
| | CTCGTAGCCGATCTTAAGGTCATTGCAGACGTGGGAACA | |
| | ACGGCTTCCAGCTGGTG | 3910 |
| | CACCAGCTGGAAGCCGT | 3911 |
| Hypercholesterolaemia | ATGACCTTAAGATCGGCTACGAGTGCCTGTGCCCCGACGGCT | 3912 |
| Arg329Pro | TCCAGCTGGTGGCCCAGCGAAGATGCGAAGGTGATTTCCGG | |
| CGA-CCA | GTGGGACTGAGCCCTGGGCCCCCTCTGCGCTTCCTGAC | |
| | GTCAGGAAGCGCAGAGGGGGCCCAGGGCTCAGTCCCACCC | 3913 |
| | GGAAATCACCTTCGCATCTTCGCTGGGCCACCAGCTGGAAGC | |
| | CGTCGGGGCACAGGCACTCGTAGCCGATCTTAAGGTCAT | |
| | GGCCCAGCGAAGATGCG | 3914 |
| | CGCATCTTCGCTGGGCC | 3915 |
| Hypercholesterolaemia | AATGACCTTAAGATCGGCTACGAGTGCCTGTGCCCCGACGG | 3916 |
| Arg329Term | CTTCCAGCTGGTGGCCCAGCGAAGATGCGAAGGTGATTTCC | |
| gCGA-TGA | GGGTGGGACTGAGCCCTGGGCCCCCTCTGCGCTTCCTGA | |
| | TCAGGAAGCGCAGAGGGGGCCCAGGGCTCAGTCCCACCCG | 3917 |
| | GAAATCACCTTCGCATCTTCGCTGGGCCACCAGCTGGAAGCC | |
| | GTCGGGGCACAGGCACTCGTAGCCGATCTTAAGGTCATT | |
| | TGGCCCAGCGAAGATGC | 3918 |
| | GCATCTTCGCTGGGCCA | 3919 |
| Hypercholesterolaemia | TCTAGCCATTGGGGAAGAGCCTCCCCACCAAGCCTCTTTCTC | 3920 |
| Glu336Lys | TCTCTTCCAGATATCGATGAGTGTCAGGATCCCGACACCTGC | |
| tGAG-AAG | AGCCAGCTCTGCGTGAACCTGGAGGGTGGCTACAAGT | |
| | ACTTGTAGCCACCCTCCAGGTTCACGCAGAGCTGGCTGCAG | 3921 |
| | GTGTCGGGATCCTGACACTCATCGATATCTGGAAGAGAGAGA | |
| | AAGAGGCTTGGTGGGGAGGCTCTTCCCCAATGGCTAGA | |
| | ATATCGATGAGTGTCAG | 3922 |
| | CTGACACTCATCGATAT | 3923 |
| Hypercholesterolaemia | CATTGGGGAAGAGCCTCCCCACCAAGCCTCTTTCTCTCTCTT | 3924 |
| Gln338Term | CCAGATATCGATGAGTGTCAGGATCCCGACACCTGCAGCCAG | |
| tCAG-TAG | CTCTGCGTGAACCTGGAGGGTGGCTACAAGTGCCAGT | |
| | ACTGGCACTTGTAGCCACCCTCCAGGTTCACGCAGAGCTGG | 3925 |
| | CTGCAGGTGTCGGGATCCTGACACTCATCGATATCTGGAAGA | |
| | GAGAGAAAGAGGCTTGGTGGGGAGGCTCTTCCCCAATG | |
| | ATGAGTGTCAGGATCCC | 3926 |
| | GGGATCCTGACACTCAT | 3927 |
| Hypercholesterolaemia | TCCCCACCAAGCCTCTTTCTCTCTCTTCCAGATATCGATGAGT | 3928 |
| Cys343Arg | GTCAGGATCCCGACACCTGCAGCCAGCTCTGCGTGAACCTG | |
| cTGC-CGC | GAGGGTGGCTACAAGTGCCAGTGTGAGGAAGGCTTCC | |
| | GGAAGCCTTCCTCACACTGGCACTTGTAGCCACCCTCCAGGT | 3929 |
| | TCACGCAGAGCTGGCTGCAGGTGTCGGGATCCTGACACTCA | |
| | TCGATATCTGGAAGAGAGAGAAAGAGGCTTGGTGGGGA | |
| | CCGACACCTGCAGCCAG | 3930 |
| | CTGGCTGCAGGTGTCGG | 3931 |
| Hypercholesterolaemia | CAAGCCTCTTTCTCTCTCTTCCAGATATCGATGAGTGTCAGGA | 3932 |
| Gln345Arg | TCCCGACACCTGCAGCCAGCTCTGCGTGAACCTGGAGGGTG | |
| CAG-CGG | GCTACAAGTGCCAGTGTGAGGAAGGCTTCCAGCTGGA | |
| | TCCAGCTGGAAGCCTTCCTCACACTGGCACTTGTAGCCACCC | 3933 |
| | TCCAGGTTCACGCAGAGCTGGCTGCAGGTGTCGGGATCCTG | |
| | ACACTCATCGATATCTGGAAGAGAGAGAAAGAGGCTTG | |
| | CTGCAGCCAGCTCTGCG | 3934 |
| | CGCAGAGCTGGCTGCAG | 3935 |
| Hypercholesterolaemia | TCTTTCTCTCTCTTCCAGATATCGATGAGTGTCAGGATCCCGA | 3936 |
| Cys347Tyr | CACCTGCAGCCAGCTCTGCGTGAACCTGGAGGGTGGCTACA | |
| TGC-TAC | AGTGCCAGTGTGAGGAAGGCTTCCAGCTGGACCCCCA | |
| | TGGGGGTCCAGCTGGAAGCCTTCCTCACACTGGCACTTGTAG | 3937 |
| | CCACCCTCCAGGTTCACGCAGAGCTGGCTGCAGGTGTCGGG | |
| | ATCCTGACACTCATCGATATCTGGAAGAGAGAGAAAGA | |
| | CCAGCTCTGCGTGAACC | 3938 |
| | GGTTCACGCAGAGCTGG | 3939 |
| Hypercholesterolaemia | CTCTTTCTCTCTCTTCCAGATATCGATGAGTGTCAGGATCCCG | 3940 |
| Cys347Arg | ACACCTGCAGCCAGCTCTGCGTGAACCTGGAGGGTGGCTAC | |
| cTGC-CGC | AAGTGCCAGTGTGAGGAAGGCTTCCAGCTGGACCCCC | |
| | GGGGGTCCAGCTGGAAGCCTTCCTCACACTGGCACTTGTAG | 3941 |
| | CCACCCTCCAGGTTCACGCAGAGCTGGCTGCAGGTGTCGGG | |
| | ATCCTGACACTCATCGATATCTGGAAGAGAGAGAAAGAG | |
| | GCCAGCTCTGCGTGAAC | 3942 |
| | GTTCACGCAGAGCTGGC | 3943 |
| Hypercholesterolaemia | CAGATATCGATGAGTGTCAGGATCCCGACACCTGCAGCCAGC | 3944 |
| Gly352Asp | TCTGCGTGAACCTGGAGGGTGGCTACAAGTGCCAGTGTGAG | |
| GGT-GAT | GAAGGCTTCCAGCTGGACCCCCACACGAAGGCCTGCAA | |
| | TTGCAGGCCTTCGTGTGGGGGTCCAGCTGGAAGCCTTCCTC | 3945 |
| | ACACTGGCACTTGTAGCCACCCTCCAGGTTCACGCAGAGCTG | |
| | GCTGCAGGTGTCGGGATCCTGACACTCATCGATATCTG | |
| | CCTGGAGGGTGGCTACA | 3946 |
| | TGTAGCCACCCTCCAGG | 3947 |
| Hypercholesterolaemia | TCGATGAGTGTCAGGATCCCGACACCTGCAGCCAGCTCTGC | 3948 |
| Tyr354Cys | GTGAACCTGGAGGGTGGCTACAAGTGCCAGTGTGAGGAAGG | |
| TAC-TGC | CTTCCAGCTGGACCCCCACACGAAGGCCTGCAAGGCTGT | |
| | ACAGCCTTGCAGGCCTTCGTGTGGGGGTCCAGCTGGAAGCC | 3949 |
| | TTCCTCACACTGGCACTTGTAGCCACCCTCCAGGTTCACGCA | |
| | GAGCTGGCTGCAGGTGTCGGGATCCTGACACTCATCGA | |
| | GGGTGGCTACAAGTGCC | 3950 |
| | GGCACTTGTAGCCACCC | 3951 |
| Hypercholesterolaemia | CAGGATCCCGACACCTGCAGCCAGCTCTGCGTGAACCTGGA | 3952 |
| Cys358Arg | GGGTGGCTACAAGTGCCAGTGTGAGGAAGGCTTCCAGCTGG | |
| gTGT-CGT | ACCCCCACACGAAGGCCTGCAAGGCTGTGGGTGAGCACG | |
| | CGTGCTCACCCACAGCCTTGCAGGCCTTCGTGTGGGGGTCC | 3953 |
| | AGCTGGAAGCCTTCCTCACACTGGCACTTGTAGCCACCCTCC | |
| | AGGTTCACGCAGAGCTGGCTGCAGGTGTCGGGATCCTG | |
| | AGTGCCAGTGTGAGGAA | 3954 |
| | TTCCTCACACTGGCACT | 3955 |
| Hypercholesterolaemia | TGCAGCCAGCTCTGCGTGAACCTGGAGGGTGGCTACAAGTG | 3956 |
| Gln363Term | CCAGTGTGAGGAAGGCTTCCAGCTGGACCCCCACACGAAGG | |
| cCAG-TAG | CCTGCAAGGCTGTGGGTGAGCACGGGAAGGCGGCGGGTG | |
| | CACCCGCCGCCTTCCCGTGCTCACCCACAGCCTTGCAGGCC | 3957 |
| | TTCGTGTGGGGGTCCAGCTGGAAGCCTTCCTCACACTGGCA | |
| | CTTGTAGCCACCCTCCAGGTTCACGCAGAGCTGGCTGCA | |
| | AAGGCTTCCAGCTGGAC | 3958 |
| | GTCCAGCTGGAAGCCTT | 3959 |

### EXAMPLE 23

### UDP—Glucuronosyltransferase—UGT1

[0239] Mutations in the human UGT1 gene result in a range of disease syndromes, ranging from relatively common diseases such as Gilbert's syndrome, which effects up to 7% of the population, to rare disorders such as Crigler-Najjar syndrome. Symptoms of these diseases are the result of diminished bilirubin conjugation and typically present with jaundice or, when mild, as an incidental finding during routing laboratory analysis. Severe cases of Crigler-Najjar syndrome are caused by an absence of UGT1 activity and the majority of these patients die in the neonatal period. The only known treatment is liver transplant. The attached table discloses the correcting oligonucleotide base sequences for the UGT1 oligonucleotides of the invention.

TABLE 25
UGT1 Mutations and Genome-Correcting Oligos

| | |
|---|---|
| Clinical Phenotype & | SEQ ID |

| | | |
|---|---|---|
| Mutation | Correcting Oligos | NO: |

| | | |
|---|---|---|
| Crigler-Najjar syndrome | GCAGGAGCAAAGGCGCCATGGCTGTGGAGTCCCAGGGCGG | 3960 |
| 2 | ACGCCCACTTGTCCTGGGCCTGCTGCTGTGTGTGCTGGGCC | |
| Leu15Arg | CAGTGGTGTCCCATGCTGGGAAGATACTGTTGATCCCAGT | |
| CTG-CGG | ACTGGGATCAACAGTATCTTCCCAGCATGGGACACCACTGGG | 3961 |
| | CCCAGCACACACAGCAGCAGGCCCAGGACAAGTGGGCGTCC | |
| | GCCCTGGGACTCCACAGCCATGGCGCCTTTGCTCCTGC | |
| | CCTGGGCCTGCTGCTGT | 3962 |
| | ACAGCAGCAGGCCCAGG | 3963 |
| Crigler-Najjar syndrome | GGGAAGATACTGTTGATCCCAGTGGATGGCAGCCACTGGCT | 3964 |
| 1 | GAGCATGCTTGGGGCCATCCAGCAGCTGCAGCAGAGGGGAC | |
| Gln49Term | ATGAAATAGTTGTCCTAGCACCTGACGCCTCGTTGTACA | |
| CAG-TAG | TGTACAACGAGGCGTCAGGTGCTAGGACAACTATTTCATGTC | 3965 |
| | CCCTCTGCTGCAGCTGCTGGATGGCCCCAAGCATGCTCAGC | |
| | CAGTGGCTGCCATCCACTGGGATCAACAGTATCTTCCC | |
| | GGGCCATCCAGCAGCTG | 3966 |
| | CAGCTGCTGGATGGCCC | 3967 |
| Crigler-Najjar syndrome | CAGCAGAGGGGACATGAAATAGTTGTCCTAGCACCTGACGCC | 3968 |
| 1 | TCGTTGTACATCAGAGACGGAGCATTTTACACCTTGAAGACG | |
| Gly71Arg | TACCCTGTGCCATTCCAAAGGGAGGATGTGAAAGAGT | |
| GGA-AGA | ACTCTTTCACATCCTCCCTTTGGAATGGCACAGGGTACGTCTT | 3969 |
| | CAAGGTGTAAAATGCTCCGTCTCTGATGTACAACGAGGCGTC | |
| | AGGTGCTAGGACAACTATTTCATGTCCCCTCTGCTG | |
| | TCAGAGACGGAGCATTT | 3970 |
| | AAATGCTCCGTCTCTGA | 3971 |
| Gilbert syndrome | GGGTGAAGAACATGCTCATTGCCTTTTCACAGAACTTTCTGTG | 3972 |
| Pro229Gln | CGACGTGGTTTATTCCCCGTATGCAACCCTTGCCTCAGAATTC | |
| CCG-CAG | CTTCAGAGAGAGGTGACTGTCCAGGACCTATTGAG | |
| | CTCAATAGGTCCTGGACAGTCACCTCTCTCTGAAGGAATTCT | 3973 |
| | GAGGCAAGGGTTGCATACGGGGAATAAACCACGTCGCACAG | |
| | AAAGTTCTGTGAAAAGGCAATGAGCATGTTCTTCACCC | |
| | TTATTCCCCGTATGCAA | 3974 |
| | TTGCATACGGGGAATAA | 3975 |
| Crigler-Najjar syndrome | TGTGAAGGATTACCCTAGGCCCATCATGCCCAATATGGTTTTT | 3976 |
| 1 | GTTGGTGGAATCAACTGCCTTCACCAAAATCCACTATCCCAG | |
| Cys280Term | GTGTGTATTGGAGTGGGACTTTTACATGCGTATATT | |
| TGC-TGA | AATATACGCATGTAAAAGTCCCACTCCAATACACACCTGGGAT | 3977 |
| | AGTGGATTTTGGTGAAGGCAGTTGATTCCACCAACAAAAACC | |
| | ATATTGGGCATGATGGGCCTAGGGTAATCCTTCACA | |
| | ATCAACTGCCTTCACCA | 3978 |
| | TGGTGAAGGCAGTTGAT | 3979 |
| Crigler-Najjar syndrome | ATCAAAGAATATGAGAAAAAATTAACTGAAAATTTTTCTTCTGG | 3980 |
| 1 | CTCTAGGAATTTGAAGCCTACATTAATGCTTCTGGAGAACATG | |
| Ala292Val | GAATTGTGGTTTTCTCTTTGGGATCAATGGTCTC | |
| GCC-GTC | GAGACCATTGATCCCAAAGAGAAAACCACAATTCCATGTTCTC | 3981 |
| | CAGAAGCATTAATGTAGGCTTCAAATTCCTAGAGCCAGAAGA | |
| | AAAATTTTCAGTTAATTTTTTCTCATATTCTTTGAT | |
| | ATTTGAAGCCTACATTA | 3982 |
| | TAATGTAGGCTTCAAAT | 3983 |
| Crigler-Najjar syndrome | AGGAATTTGAAGCCTACATTAATGCTTCTGGAGAACATGGAAT | 3984 |
| 1 | TGTGGTTTTCTCTTTGGGATCAATGGTCTCAGAAATTCCAGAG | |
| Gly308Glu | AAGAAAGCTATGGCAATTGCTGATGCTTTGGGCAA | |
| GGA-GAA | TTGCCCAAAGCATCAGCAATTGCCATAGCTTTCTTCTCTGGAA | 3985 |
| | TTTCTGAGACCATTGATCCCAAAGAGAAAACCACAATTCCATG | |
| | TTCTCCAGAAGCATTAATGTAGGCTTCAAATTCCT | |
| | CTCTTTGGGATCAATGG | 3986 |
| | CCATTGATCCCAAAGAG | 3987 |
| Crigler-Najjar syndrome | GTCTCAGAAATTCCAGAGAAGAAAGCTATGGCAATTGCTGAT | 3988 |
| 1 | GCTTTGGGCAAAATCCCTCAGACAGTAAGAAGATTCTATACCA | |
| Gln331Term | TGGCCTCATATCTATTTTCACAGGAGCGCTAATCCC | |
| CAG-TAG | GGGATTAGCGCTCCTGTGAAAATAGATATGAGGCCATGGTAT | 3989 |
| | AGAATCTTCTTACTGTCTGAGGGATTTTGCCCAAAGCATCAGC | |
| | AATTGCCATAGCTTTCTTCTCTGGAATTTCTGAGAC | |
| | AAATCCCTCAGACAGTA | 3990 |
| | TACTGTCTGAGGGATTT | 3991 |
| Crigler-Najjar syndrome | TCTAATCATATTATGTTCTTTCTTTACGTTCTGCTCTTTTTGCC | 3992 |
| 1 | CCTCCCAGGTCCTGTGGCGGTACACTGGAACCCGACCATCG | |
| Trp335Term | AATCTTGCGAACAACACGATACTTGTTAAGTGGCTA | |
| TGG-TGA | TAGCCACTTAACAAGTATCGTGTTGTTCGCAAGATTCGATGGT | 3993 |
| | CGGGTTCCAGTGTACCGCCACAGGACCTGGGAGGGGCAAAA | |
| | AGAGCAGAACGTAAAGAAAGAACATAATATGATTAGA | |
| | GTCCTGTGGCGGTACAC | 3994 |
| | GTGTACCGCCACAGGAC | 3995 |
| Crigler-Najjar syndrome | ACACTGGAACCCGACCATCGAATCTTGCGAACAACACGATAC | 3996 |
| 1 | TTGTTAAGTGGCTACCCCAAAACGATCTGCTTGGTATGTTGG | |
| Gln357Arg | GCGGATTGGATGTATAGGTCAAACCAGGGTCAAATTA | |
| CAA-CGA | TAATTTGACCCTGGTTTGACCTATACATCCAATCCGCCCAACA | 3997 |
| | TACCAAGCAGATCGTTTTGGGGTAGCCACTTAACAAGTATCG | |
| | TGTTGTTCGCAAGATTCGATGGTCGGGTTCCAGTGT | |
| | GCTACCCCAAAACGATC | 3998 |
| | GATCGTTTTGGGGTAGC | 3999 |
| Crigler-Najjar syndrome | TACACTGGAACCCGACCATCGAATCTTGCGAACAACACGATA | 4000 |
| 1 | CTTGTTAAGTGGCTACCCCAAAACGATCTGCTTGGTATGTTG | |
| Gln357Term | GGCGGATTGGATGTATAGGTCAAACCAGGGTCAAATT | |
| CAA-TAA | AATTTGACCCTGGTTTGACCTATACATCCAATCCGCCCAACAT | 4001 |
| | ACCAAGCAGATCGTTTTGGGGTAGCCACTTAACAAGTATCGT | |
| | GTTGTTCGCAAGATTCGATGGTCGGGTTCCAGTGTA | |
| | GGCTACCCCAAAACGAT | 4002 |
| | ATCGTTTTGGGGTAGCC | 4003 |
| Gilbert syndrome | AACTCAGAGATGTAACTGCTGACATCCTCCCTATTTTGCATCT | 4004 |
| Arg367Gly | CAGGTCACCCGATGACCCGTGCCTTTATCACCCATGCTGGTT | |
| CGT-GGT | CCCATGGTGTTTATGAAAGCATATGCAATGGCGTTC | |
| | GAACGCCATTGCATATGCTTTCATAAACACCATGGGAACCAG | 4005 |
| | CATGGGTGATAAAGGCACGGGTCATCGGGTGACCTGAGATG | |
| | CAAAATAGGGAGGATGTCAGCAGTTACATCTCTGAGTT | |
| | CGATGACCCGTGCCTTT | 4006 |
| | AAAGGCACGGGTCATCG | 4007 |
| Crigler-Najjar syndrome | TCAGAGATGTAACTGCTGACATCCTCCCTATTTTGCATCTCAG | 4008 |
| 1 | GTCACCCGATGACCCGTGCCTTTATCACCCATGCTGGTTCCC | |
| Ala368Thr | ATGGTGTTTATGAAAGCATATGCAATGGCGTTCCCA | |
| GCC-ACC | TGGGAACGCCATTGCATATGCTTTCATAAACACCATGGGAAC | 4009 |
| | CAGCATGGGTGATAAAGGCACGGGTCATCGGGTGACCTGAG | |
| | ATGCAAAATAGGGAGGATGTCAGCAGTTACATCTCTGA | |
| | TGACCCGTGCCTTTATC | 4010 |
| | GATAAAGGCACGGGTCA | 4011 |
| Crigler-Najjar syndrome | CCTCCCTATTTTGCATCTCAGGTCACCCGATGACCCGTGCCT | 4012 |
| 1 | TTATCACCCATGCTGGTTCCCATGGTGTTTATGAAAGCATATG | |
| Ser375Phe | CAATGGCGTTCCCATGGTGATGATGCCCTTGTTTGG | |
| TCC-TTC | CCAAACAAGGGCATCATCACCATGGGAACGCCATTGCATATG | 4013 |
| | CTTTCATAAACACCATGGGAACCAGCATGGGTGATAAAGGCA | |
| | CGGGTCATCGGGTGACCTGAGATGCAAAATAGGGAGG | |
| | TGCTGGTTCCCATGGTG | 4014 |
| | CACCATGGGAACCAGCA | 4015 |
| Crigler-Najjar syndrome | AGGTCACCCGATGACCCGTGCCTTTATCACCCATGCTGGTTC | 4016 |
| 1 | CCATGGTGTTTATGAAAGCATATGCAATGGCGTTCCCATGGT | |
| Ser381Arg | GATGATGCCCTTGTTTGGTGATCAGATGGACAATGCA | |
| AGC-AGG | TGCATTGTCCATCTGATCACCAAACAAGGGCATCATCACCAT | 4017 |
| | GGGAACGCCATTGCATATGCTTTCATAAACACCATGGGAACC | |
| | AGCATGGGTGATAAAGGCACGGGTCATCGGGTGACCT | |
| | TATGAAAGCATATGCAA | 4018 |
| | TTGCATATGCTTTCATA | 4019 |
| Crigler-Najjar syndrome | AGCATATGCAATGGCGTTCCCATGGTGATGATGCCCTTGTTT | 4020 |
| 1 | GGTGATCAGATGGACAATGCAAAGCGCATGGAGACTAAGGG | |
| Ala401Pro | AGCTGGAGTGACCCTGAATGTTCTGGAAATGACTTCTG | |
| GCA-CCA | CAGAAGTCATTTCCAGAACATTCAGGGTCACTCCAGCTCCCT | 4021 |
| | TAGTCTCCATGCGCTTTGCATTGTCCATCTGATCACCAAACAA | |
| | GGGCATCATCACCATGGGAACGCCATTGCATATGCT | |
| | TGGACAATGCAAAGCGC | 4022 |
| | GCGCTTTGCATTGTCCA | 4023 |
| Crigler-Najjar syndrome | GGAGCTGGAGTGACCCTGAATGTTCTGGAAATGACTTCTGAA | 4024 |
| 1 | GATTTAGAAAATGCTCTAAAAGCAGTCATCAATGACAAAAGGT | |
| Lys428Glu | AAGAAAGAAGATACAGAAGAATACTTTGGTCATGGC | |
| AAA-GAA | GCCATGACCAAAGTATTCTTCTGTATCTTCTTTCTTACCTTTTG | 4025 |
| | TCATTGATGACTGCTTTTAGAGCATTTTCTAAATCTTCAGAAGT | |
| | CATTTCCAGAACATTCAGGGTCACTCCAGCTCC | |
| | ATGCTCTAAAAGCAGTC | 4026 |
| | GACTGCTTTTAGAGCAT | 4027 |
| Crigler-Najjar syndrome | ATGAGGCACAAGGGCGCGCCACACCTGCGCCCCGCAGCCCA | 4028 |
| 1 | CGACCTCACCTGGTACCAGTACCATTCCTTGGACGTGATTGG | |
| Tyr486Asp | TTTCCTCTTGGCCGTCGTGCTGACAGTGGCCTTCATCA | |
| TAC-GAC | TGATGAAGGCCACTGTCAGCACGACGGCCAAGAGGAAACCA | 4029 |
| | ATCACGTCCAAGGAATGGTACTGGTACCAGGTGAGGTCGTG | |
| | GGCTGCGGGGCGCAGGTGTGGCGCGCCCTTGTGCCTCAT | |
| | GGTACCAGTACCATTCC | 4030 |
| | GGAATGGTACTGGTACC | 4031 |
| Crigler-Najjar syndrome | ACAAGGGCGCGCCACACCTGCGCCCCGCAGCCCACGACCTC | 4032 |
| 1 | ACCTGGTACCAGTACCATTCCTTGGACGTGATTGGTTTCCTCT | |
| Ser488Phe | TGGCCGTCGTGCTGACAGTGGCCTTCATCACCTTTAA | |
| TCC-TTC | TTAAAGGTGATGAAGGCCACTGTCAGCACGACGGCCAAGAG | 4033 |
| | GAAACCAATCACGTCCAAGGAATGGTACTGGTACCAGGTGAG | |
| | GTCGTGGGCTGCGGGGCGCAGGTGTGGCGCGCCCTTGT | |
| | GTACCATTCCTTGGACG | 4034 |
| | CGTCCAAGGAATGGTAC | 4035 |

### EXAMPLE 24

### Alzheimer's Disease—Amyloid Precursor Protein (APP)

[0240] Over the past few decades Alzheimer's disease (AD), once considered a rare disorder, has become recognized as a major public health problem. Although there is no agreement on the exact prevalence of Alzheimer's disease, in part due to difficulties of diagnosis, studies consistently point to an exponential rise in prevalence of this disease with age. After age 65, the percentage of affected people approximately doubles with every decade of life, regardless of definition. Among people age 85 or older, studies suggest that 25 to 35 percent have dementia, including Alzheimer's disease; one study reports that 47.2 percent of people over age 85 have Alzheimer's disease, exclusive of other dementias.

[0241] Alzheimer's disease progressively destroys memory, reason, judgment, language, and, eventually, the ability to carry out even the simplest tasks. Anatomic changes associated with Alzheimer's disease begin in the entorhinal cortex, proceed to the hippocampus, and then gradually spread to other regions, particularly the cerebral cortex. Chief among such anatomic changes are the presence of characteristic extracellular plaques and internal neurofibrillary tangles.

[0242] At least four genes have been identified to date that contribute to development of Alzheimer's disease: AD1 is caused by mutations in the amyloid precursor gene (APP); AD2 is associated with a particular allele of APOE (see Example 20); AD3 is caused by mutation in a gene encoding a 7-transmembrane domain protein, presenilin-1 (PSEN1), and AD4 is caused by mutation in a gene that encodes a similar 7-transmembrane domain protein, presenilin-2 (PSEN2). The attached table discloses the correcting oligonucleotide base sequences for the APP oligonucleotides of the invention.

TABLE 26
APP Mutations and Genome-Correcting Oligos

| | |
|---|---|
| Clinical Phenotype & | SEQ ID |

| | | |
|---|---|---|
| Mutation | Correcting Oligos | NO: |

| | | |
|---|---|---|
| Alzheimer disease | CTGCATACTTTAATTATGATGTAATACAGGTTCTGGGTTGACA | 4036 |
| Glu665Asp | AATATCAAGACGGAGGAGATCTCTGAAGTGAAGATGGATGCA | |
| GAG-GAC | GAATTCCGACATGACTCAGGATATGAAGTTCATCAT | |
| | ATGATGAACTTCATATCCTGAGTCATGTCGGAATTCTGCATCC | 4037 |
| | ATCTTCACTTCAGAGATCTCCTCCGTCTTGATATTTGTCAACC | |
| | CAGAACCTGTATTACATCATAATTAAAGTATGCAG | |
| | ACGGAGGAGATCTCTGA | 4038 |
| | TCAGAGATCTCCTCCGT | 4039 |
| Alzheimer disease | ATTATATTGCATTTAGAAATTAAAATTCTTTTTCTTAATTTGTTT | 4040 |
| Ala692Gly | TCAAGGTGTTCTTTGCAGAAGATGTGGGTTCAAACAAAGGTG | |
| GCA-GGA | CAATCATTGGACTCATGGTGGGCGGTGTTGTCAT | |
| | ATGACAACACCGCCCACCATGAGTCCAATGATTGCACCTTTG | 4041 |
| | TTTGAACCCACATCTTCTGCAAAGAACACCTTGAAAACAAATT | |
| | AAGAAAAAGAATTTTAATTTCTAAATGCAATATAAT | |
| | GTTCTTTGCAGAAGATG | 4042 |
| | CATCTTCTGCAAAGAAC | 4043 |
| Alzheimer disease | TATATTGCATTTAGAAATTAAAATTCTTTTTCTTAATTTGTTTTC | 4044 |
| Glu693Gln | AAGGTGTTCTTTGCAGAAGATGTGGGTTCAAACAAAGGTGCA | |
| GAA-CAA | ATCATTGGACTCATGGTGGGCGGTGTTGTCATAG | |
| | CTATGACAACACCGCCCACCATGAGTCCAATGATTGCACCTT | 4045 |
| | TGTTTGAACCCACATCTTCTGCAAAGAACACCTTGAAAACAAA | |
| | TTAAGAAAAAGAATTTTAATTTCTAAATGCAATATA | |
| | TCTTTGCAGAAGATGTG | 4046 |
| | CACATCTTCTGCAAAGA | 4047 |
| Alzheimer disease | ATATTGCATTTAGAAATTAAAATTCTTTTTCTTAATTTGTTTTCA | 4048 |
| Glu693Gly | AGGTGTTCTTTGCAGAAGATGTGGGTTCAAACAAAGGTGCAA | |
| GAA-GGA | TCATTGGACTCATGGTGGGCGGTGTTGTCATAGC | |
| | GCTATGACAACACCGCCCACCATGAGTCCAATGATTGCACCT | 4049 |
| | TTGTTTGAACCCACATCTTCTGCAAAGAACACCTTGAAAACAA | |
| | ATTAAGAAAAAGAATTTTAATTTCTAAATGCAATAT | |
| | CTTTGCAGAAGATGTGG | 4050 |
| | CCACATCTTCTGCAAAG | 4051 |
| Alzheimer disease | GAAGATGTGGGTTCAAACAAAGGTGCAATCATTGGACTCATG | 4052 |
| Ala713Thr | GTGGGCGGTGTTGTCATAGCGACAGTGATCGTCATCACCTTG | |
| GCG-ACG | GTGATGCTGAAGAAGAAACAGTACACATCCATTCATC | |
| | GATGAATGGATGTGTACTGTTTCTTCTTCAGCATCACCAAGGT | 4053 |
| | GATGACGATCACTGTCGCTATGACAACACCGCCCACCATGAG | |
| | TCCAATGATTGCACCTTTGTTTGAACCCACATCTTC | |
| | TTGTCATAGCGACAGTG | 4054 |
| | CACTGTCGCTATGACAA | 4055 |
| Schizophrenia | AAGATGTGGGTTCAAACAAAGGTGCAATCATTGGACTCATGG | 4056 |
| Ala713Val | TGGGCGGTGTTGTCATAGCGACAGTGATCGTCATCACCTTGG | |
| GCG-GTG | TGATGCTGAAGAAGAAACAGTACACATCCATTCATCA | |
| | TGATGAATGGATGTGTACTGTTTCTTCTTCAGCATCACCAAGG | 4057 |
| | TGATGACGATCACTGTCGCTATGACAACACCGCCCACCATGA | |
| | GTCCAATGATTGCACCTTTGTTTGAACCCACATCTT | |
| | TGTCATAGCGACAGTGA | 4058 |
| | TCACTGTCGCTATGACA | 4059 |
| Alzheimer disease | GTGGGTTCAAACAAAGGTGCAATCATTGGACTCATGGTGGGC | 4060 |
| Val715Met | GGTGTTGTCATAGCGACAGTGATCGTCATCACCTTGGTGATG | |
| GTG-ATG | CTGAAGAAGAAACAGTACACATCCATTCATCATGGTG | |
| | CACCATGATGAATGGATGTGTACTGTTTCTTCTTCAGCATCAC | 4061 |
| | CAAGGTGATGACGATCACTGTCGCTATGACAACACCGCCCAC | |
| | CATGAGTCCAATGATTGCACCTTTGTTTGAACCCAC | |
| | TAGCGACAGTGATCGTC | 4062 |
| | GACGATCACTGTCGCTA | 4063 |
| Alzheimer disease | GGTTCAAACAAAGGTGCAATCATTGGACTCATGGTGGGCGGT | 4064 |
| Ile716Val | GTTGTCATAGCGACAGTGATCGTCATCACCTTGGTGATGCTG | |
| ATC-GTC | AAGAAGAAACAGTACACATCCATTCATCATGGTGTGG | |
| | CCACACCATGATGAATGGATGTGTACTGTTTCTTCTTCAGCAT | 4065 |
| | CACCAAGGTGATGACGATCACTGTCGCTATGACAACACCGCC | |
| | CACCATGAGTCCAATGATTGCACCTTTGTTTGAACC | |
| | CGACAGTGATCGTCATC | 4066 |
| | GATGACGATCACTGTCG | 4067 |
| Alzheimer disease | CAAACAAAGGTGCAATCATTGGACTCATGGTGGGCGGTGTTG | 4068 |
| Val717Gly | TCATAGCGACAGTGATCGTCATCACCTTGGTGATGCTGAAGA | |
| GTC-GGC | AGAAACAGTACACATCCATTCATCATGGTGTGGTGGA | |
| | TCCACCACACCATGATGAATGGATGTGTACTGTTTCTTCTTCA | 4069 |
| | GCATCACCAAGGTGATGACGATCACTGTCGCTATGACAACAC | |
| | CGCCCACCATGAGTCCAATGATTGCACCTTTGTTTG | |
| | AGTGATCGTCATCACCT | 4070 |
| | AGGTGATGACGATCACT | 4071 |
| Alzheimer disease | TCAAACAAAGGTGCAATCATTGGACTCATGGTGGGCGGTGTT | 4072 |
| Val717Ile | GTCATAGCGACAGTGATCGTCATCACCTTGGTGATGCTGAAG | |
| GTC-ATC | AAGAAACAGTACACATCCATTCATCATGGTGTGGTGG | |
| | CCACCACACCATGATGAATGGATGTGTACTGTTTCTTCTTCAG | 4073 |
| | CATCACCAAGGTGATGACGATCACTGTCGCTATGACAACACC | |
| | GCCCACCATGAGTCCAATGATTGCACCTTTGTTTGA | |
| | CAGTGATCGTCATCACC | 4074 |
| | GGTGATGACGATCACTG | 4075 |
| Alzheimer disease | TCAAACAAAGGTGCAATCATTGGACTCATGGTGGGCGGTGTT | 4076 |
| Val717Phe | GTCATAGCGACAGTGATCGTCATCACCTTGGTGATGCTGAAG | |
| GTC-TTC | AAGAAACAGTACACATCCATTCATCATGGTGTGGTGG | |
| | CCACCACACCATGATGAATGGATGTGTACTGTTTCTTCTTCAG | 4077 |
| | CATCACCAAGGTGATGACGATCACTGTCGCTATGACAACACC | |
| | GCCCACCATGAGTCCAATGATTGCACCTTTGTTTGA | |
| | CAGTGATCGTCATCACC | 4078 |
| | GGTGATGACGATCACTG | 4079 |
| Alzheimer disease | TTGGACTCATGGTGGGCGGTGTTGTCATAGCGACAGTGATCG | 4080 |
| Leu723Pro | TCATCACCTTGGTGATGCTGAAGAAGAAACAGTACACATCCAT | |
| CTG-CCG | TCATCATGGTGTGGTGGAGGTAGGTAAACTTGACTG | |
| | CAGTCAAGTTTACCTACCTCCACCACACCATGATGAATGGAT | 4081 |
| | GTGTACTGTTTCTTCTTCAGCATCACCAAGGTGATGACGATCA | |
| | CTGTCGCTATGACAACACCGCCCACCATGAGTCCAA | |
| | GGTGATGCTGAAGAAGA | 4082 |
| | TCTTCTTCAGCATCACC | 4083 |

### EXAMPLE 25

### Alzheimer's Disease—Presenilin—1 (PSEN1)

[0243] The attached table discloses the correcting oligonucleotide base sequences for the PSEN1 oligonucleotides of the invention.

TABLE 27
PSEN1 Mutations and Genome-Correcting Oligos

| | |
|---|---|
| Clinical Phenotype & | SEQ ID |

| | | |
|---|---|---|
| Mutation | Correcting Oligos | NO: |

| | | |
|---|---|---|
| Alzheimer disease | CCCGGCAGGTGGTGGAGCAAGATGAGGAAGAAGATGAGGAG | 4084 |
| Ala79Val | CTGACATTGAAATATGGCGCCAAGCATGTGATCATGCTCTTTG | |
| GCC-GTC | TCCCTGTGACTCTCTGCATGGTGGTGGTCGTGGCTAC | |
| | GTAGCCACGACCACCACCATGCAGAGAGTCACAGGGACAAA | 4085 |
| | GAGCATGATCACATGCTTGGCGCCATATTTCAATGTCAGCTC | |
| | CTCATCTTCTTCCTCATCTTGCTCCACCACCTGCCGGG | |
| | ATATGGCGCCAAGCATG | 4086 |
| | CATGCTTGGCGCCATAT | 4087 |
| Alzheimer disease | GTGGTGGAGCAAGATGAGGAAGAAGATGAGGAGCTGACATT | 4088 |
| Val82Leu | GAAATATGGCGCCAAGCATGTGATCATGCTCTTTGTCCCTGT | |
| tGTG-CTG | GACTCTCTGCATGGTGGTGGTCGTGGCTACCATTAAGT | |
| | ACTTAATGGTAGCCACGACCACCACCATGCAGAGAGTCACAG | 4089 |
| | GGACAAAGAGCATGATCACATGCTTGGCGCCATATTTCAATG | |
| | TCAGCTCCTCATCTTCTTCCTCATCTTGCTCCACCAC | |
| | CCAAGCATGTGATCATG | 4090 |
| | CATGATCACATGCTTGG | 4091 |
| Alzheimer disease | AAATATGGCGCCAAGCATGTGATCATGCTCTTTGTCCCTGTG | 4092 |
| Val96Phe | ACTCTCTGCATGGTGGTGGTCGTGGCTACCATTAAGTCAGTC | |
| gGTC-TTC | AGCTTTTATACCCGGAAGGATGGGCAGCTGTACGTAT | |
| | ATACGTACAGCTGCCCATCCTTCCGGGTATAAAAGCTGACTG | 4093 |
| | ACTTAATGGTAGCCACGACCACCACCATGCAGAGAGTCACAG | |
| | GGACAAAGAGCATGATCACATGCTTGGCGCCATATTT | |
| | TGGTGGTGGTCGTGGCT | 4094 |
| | AGCCACGACCACCACCA | 4095 |
| Alzheimer disease | CTTTGTCCCTGTGACTCTCTGCATGGTGGTGGTCGTGGCTAC | 4096 |
| Phe105Leu | CATTAAGTCAGTCAGCTTTTATACCCGGAAGGATGGGCAGCT | |
| TTTt-TTG | GTACGTATGAGTTTTGTTTTATTATTCTCAAAGCCAG | |
| | CTGGCTTTGAGAATAATAAAACAAAACTCATACGTACAGCTGC | 4097 |
| | CCATCCTTCCGGGTATAAAAGCTGACTGACTTAATGGTAGCC | |
| | ACGACCACCACCATGCAGAGAGTCACAGGGACAAAG | |
| | GTCAGCTTTTATACCCG | 4098 |
| | CGGGTATAAAAGCTGAC | 4099 |
| Alzheimer disease | TGGTGATCTCCATTAACACTGACCTAGGGCTTTTGTGTTTGTT | 4100 |
| Thr116Asn | TTATTGTAGAATCTATACCCCATTCACAGAAGATACCGAGACT | |
| ACC-AAC | GTGGGCCAGAGAGCCCTGCACTCAATTCTGAATGC | |
| | GCATTCAGAATTGAGTGCAGGGCTCTCTGGCCCACAGTCTCG | 4101 |
| | GTATCTTCTGTGAATGGGGTATAGATTCTACAATAAAACAAAC | |
| | ACAAAAGCCCTAGGTCAGTGTTAATGGAGATCACCA | |
| | AATCTATACCCCATTCA | 4102 |
| | TGAATGGGGTATAGATT | 4103 |
| Alzheimer disease | TGATCTCCATTAACACTGACCTAGGGCTTTTGTGTTTGTTTTAT | 4104 |
| Pro117Leu | TGTAGAATCTATACCCCATTCACAGAAGATACCGAGACTGTG | |
| CCA-CTA | GGCCAGAGAGCCCTGCACTCAATTCTGAATGCTGC | |
| | GCAGCATTCAGAATTGAGTGCAGGGCTCTCTGGCCCACAGTC | 4105 |
| | TCGGTATCTTCTGTGAATGGGGTATAGATTCTACAATAAAACA | |
| | AACACAAAAGCCCTAGGTCAGTGTTAATGGAGATCA | |
| | CTATACCCCATTCACAG | 4106 |
| | CTGTGAATGGGGTATAG | 4107 |
| Alzheimer disease | TAACACTGACCTAGGGCTTTTGTGTTTGTTTTATTGTAGAATCT | 4108 |
| Glu120Asp | ATACCCCATTCACAGAAGATACCGAGACTGTGGGCCAGAGAG | |
| GAAg-GAT | CCCTGCACTCAATTCTGAATGCTGCCATCATGATC | |
| | GATCATGATGGCAGCATTCAGAATTGAGTGCAGGGCTCTCTG | 4109 |
| | GCCCACAGTCTCGGTATCTTCTGTGAATGGGGTATAGATTCT | |
| | ACAATAAAACAAACACAAAAGCCCTAGGTCAGTGTTA | |
| | TTCACAGAAGATACCGA | 4110 |
| | TCGGTATCTTCTGTGAA | 4111 |
| Alzheimer disease | TAACACTGACCTAGGGCTTTTGTGTTTGTTTTATTGTAGAATCT | 4112 |
| Glu120Asp | ATACCCCATTCACAGAAGATACCGAGACTGTGGGCCAGAGAG | |
| GAAg-GAC | CCCTGCACTCAATTCTGAATGCTGCCATCATGATC | |
| | GATCATGATGGCAGCATTCAGAATTGAGTGCAGGGCTCTCTG | 4113 |
| | GCCCACAGTCTCGGTATCTTCTGTGAATGGGGTATAGATTCT | |
| | ACAATAAAACAAACACAAAAGCCCTAGGTCAGTGTTA | |
| | TTCACAGAAGATACCGA | 4114 |
| | TCGGTATCTTCTGTGAA | 4115 |
| Alzheimer disease | ATTAACACTGACCTAGGGCTTTTGTGTTTGTTTTATTGTAGAAT | 4116 |
| Glu120Lys | CTATACCCCATTCACAGAAGATACCGAGACTGTGGGCCAGAG | |
| aGAA-AAA | AGCCCTGCACTCAATTCTGAATGCTGCCATCATGA | |
| | TCATGATGGCAGCATTCAGAATTGAGTGCAGGGCTCTCTGGC | 4117 |
| | CCACAGTCTCGGTATCTTCTGTGAATGGGGTATAGATTCTACA | |
| | ATAAAACAAACACAAAAGCCCTAGGTCAGTGTTAAT | |
| | CATTCACAGAAGATACC | 4118 |
| | GGTATCTTCTGTGAATG | 4119 |
| Alzheimer disease | GACCTAGGGCTTTTGTGTTTGTTTTATTGTAGAATCTATACCC | 4120 |
| Glu123Lys | CATTCACAGAAGATACCGAGACTGTGGGCCAGAGAGCCCTG | |
| cGAG-AAG | CACTCAATTCTGAATGCTGCCATCATGATCAGTGTCA | |
| | TGACACTGATCATGATGGCAGCATTCAGAATTGAGTGCAGGG | 4121 |
| | CTCTCTGGCCCACAGTCTCGGTATCTTCTGTGAATGGGGTAT | |
| | AGATTCTACAATAAAACAAACACAAAAGCCCTAGGTC | |
| | AAGATACCGAGACTGTG | 4122 |
| | CACAGTCTCGGTATCTT | 4123 |
| Alzheimer disease | TATACCCCATTCACAGAAGATACCGAGACTGTGGGCCAGAGA | 4124 |
| Asn135Asp | GCCCTGCACTCAATTCTGAATGCTGCCATCATGATCAGTGTC | |
| gAAT-GAT | ATTGTTGTCATGACTATCCTCCTGGTGGTTCTGTATA | |
| | TATACAGAACCACCAGGAGGATAGTCATGACAACAATGACAC | 4125 |
| | TGATCATGATGGCAGCATTCAGAATTGAGTGCAGGGCTCTCT | |
| | GGCCCACAGTCTCGGTATCTTCTGTGAATGGGGTATA | |
| | CAATTCTGAATGCTGCC | 4126 |
| | GGCAGCATTCAGAATTG | 4127 |
| Alzheimer disease | AGAAGATACCGAGACTGTGGGCCAGAGAGCCCTGCACTCAA | 4128 |
| Met139Ile | TTCTGAATGCTGCCATCATGATCAGTGTCATTGTTGTCATGAC | |
| ATGa-ATA | TATCCTCCTGGTGGTTCTGTATAAATACAGGTGCTAT | |
| | ATAGCACCTGTATTTATACAGAACCACCAGGAGGATAGTCAT | 4129 |
| | GACAACAATGACACTGATCATGATGGCAGCATTCAGAATTGA | |
| | GTGCAGGGCTCTCTGGCCCACAGTCTCGGTATCTTCT | |
| | GCCATCATGATCAGTGT | 4130 |
| | ACACTGATCATGATGGC | 4131 |
| Alzheimer disease | CAGAAGATACCGAGACTGTGGGCCAGAGAGCCCTGCACTCA | 4132 |
| Met139Lys | ATTCTGAATGCTGCCATCATGATCAGTGTCATTGTTGTCATGA | |
| ATG-AAG | CTATCCTCCTGGTGGTTCTGTATAAATACAGGTGCTA | |
| | TAGCACCTGTATTTATACAGAACCACCAGGAGGATAGTCATG | 4133 |
| | ACAACAATGACACTGATCATGATGGCAGCATTCAGAATTGAG | |
| | TGCAGGGCTCTCTGGCCCACAGTCTCGGTATCTTCTG | |
| | TGCCATCATGATCAGTG | 4134 |
| | CACTGATCATGATGGCA | 4135 |
| Alzheimer disease | CAGAAGATACCGAGACTGTGGGCCAGAGAGCCCTGCACTCA | 4136 |
| Met139Thr | ATTCTGAATGCTGCCATCATGATCAGTGTCATTGTTGTCATGA | |
| ATG-ACG | CTATCCTCCTGGTGGTTCTGTATAAATACAGGTGCTA | |
| | TAGCACCTGTATTTATACAGAACCACCAGGAGGATAGTCATG | 4137 |
| | ACAACAATGACACTGATCATGATGGCAGCATTCAGAATTGAG | |
| | TGCAGGGCTCTCTGGCCCACAGTCTCGGTATCTTCTG | |
| | TGCCATCATGATCAGTG | 4138 |
| | CACTGATCATGATGGCA | 4139 |
| Alzheimer disease | ACAGAAGATACCGAGACTGTGGGCCAGAGAGCCCTGCACTC | 4140 |
| Met139Val | AATTCTGAATGCTGCCATCATGATCAGTGTCATTGTTGTCATG | |
| cATG-GTG | ACTATCCTCCTGGTGGTTCTGTATAAATACAGGTGCT | |
| | AGCACCTGTATTTATACAGAACCACCAGGAGGATAGTCATGA | 4141 |
| | CAACAATGACACTGATCATGATGGCAGCATTCAGAATTGAGT | |
| | GCAGGGCTCTCTGGCCCACAGTCTCGGTATCTTCTGT | |
| | CTGCCATCATGATCAGT | 4142 |
| | ACTGATCATGATGGCAG | 4143 |
| Alzheimer disease | GAGACTGTGGGCCAGAGAGCCCTGCACTCAATTCTGAATGCT | 4144 |
| Ile143Phe | GCCATCATGATCAGTGTCATTGTTGTCATGACTATCCTCCTGG | |
| cATT-TTT | TGGTTCTGTATAAATACAGGTGCTATAAGGTGAGCA | |
| | TGCTCACCTTATAGCACCTGTATTTATACAGAACCACCAGGAG | 4145 |
| | GATAGTCATGACAACAATGACACTGATCATGATGGCAGCATT | |
| | CAGAATTGAGTGCAGGGCTCTCTGGCCCACAGTCTC | |
| | TCAGTGTCATTGTTGTC | 4146 |
| | GACAACAATGACACTGA | 4147 |
| Alzheimer disease | AGACTGTGGGCCAGAGAGCCCTGCACTCAATTCTGAATGCTG | 4148 |
| Ile143Thr | CCATCATGATCAGTGTCATTGTTGTCATGACTATCCTCCTGGT | |
| ATT-ACT | GGTTCTGTATAAATACAGGTGCTATAAGGTGAGCAT | |
| | ATGCTCACCTTATAGCACCTGTATTTATACAGAACCACCAGGA | 4149 |
| | GGATAGTCATGACAACAATGACACTGATCATGATGGCAGCAT | |
| | TCAGAATTGAGTGCAGGGCTCTCTGGCCCACAGTCT | |
| | CAGTGTCATTGTTGTCA | 4150 |
| | TGACAACAATGACACTG | 4151 |
| Alzheimer disease | CCAGAGAGCCCTGCACTCAATTCTGAATGCTGCCATCATGAT | 4152 |
| Met146Ile | CAGTGTCATTGTTGTCATGACTATCCTCCTGGTGGTTCTGTAT | |
| ATGa-ATA | AAATACAGGTGCTATAAGGTGAGCATGAGACACAGA | |
| | TCTGTGTCTCATGCTCACCTTATAGCACCTGTATTTATACAGA | 4153 |
| | ACCACCAGGAGGATAGTCATGACAACAATGACACTGATCATG | |
| | ATGGCAGCATTCAGAATTGAGTGCAGGGCTCTCTGG | |
| | GTTGTCATGACTATCCT | 4154 |
| | AGGATAGTCATGACAAC | 4155 |
| Alzheimer disease | CCAGAGAGCCCTGCACTCAATTCTGAATGCTGCCATCATGAT | 4156 |
| Met146Ile | CAGTGTCATTGTTGTCATGACTATCCTCCTGGTGGTTCTGTAT | |
| ATGa-ATC | AAATACAGGTGCTATAAGGTGAGCATGAGACACAGA | |
| | TCTGTGTCTCATGCTCACCTTATAGCACCTGTATTTATACAGA | 4157 |
| | ACCACCAGGAGGATAGTCATGACAACAATGACACTGATCATG | |
| | ATGGCAGCATTCAGAATTGAGTGCAGGGCTCTCTGG | |
| | GTTGTCATGACTATCCT | 4158 |
| | AGGATAGTCATGACAAC | 4159 |
| Alzheimer disease | GGCCAGAGAGCCCTGCACTCAATTCTGAATGCTGCCATCATG | 4160 |
| Met146Leu | ATCAGTGTCATTGTTGTCATGACTATCCTCCTGGTGGTTCTGT | |
| cATG-TTG | ATAAATACAGGTGCTATAAGGTGAGCATGAGACACA | |
| | TGTGTCTCATGCTCACCTTATAGCACCTGTATTTATACAGAAC | 4161 |
| | CACCAGGAGGATAGTCATGACAACAATGACACTGATCATGAT | |
| | GGCAGCATTCAGAATTGAGTGCAGGGCTCTCTGGCC | |
| | TTGTTGTCATGACTATC | 4162 |
| | GATAGTCATGACAACAA | 4163 |
| Alzheimer disease | GGCCAGAGAGCCCTGCACTCAATTCTGAATGCTGCCATCATG | 4164 |
| Met146Val | ATCAGTGTCATTGTTGTCATGACTATCCTCCTGGTGGTTCTGT | |
| cATG-GTG | ATAAATACAGGTGCTATAAGGTGAGCATGAGACACA | |
| | TGTGTCTCATGCTCACCTTATAGCACCTGTATTTATACAGAAC | 4165 |
| | CACCAGGAGGATAGTCATGACAACAATGACACTGATCATGAT | |
| | GGCAGCATTCAGAATTGAGTGCAGGGCTCTCTGGCC | |
| | TTGTTGTCATGACTATC | 4166 |
| | GATAGTCATGACAACAA | 4167 |
| Alzheimer disease | AGAGAGCCCTGCACTCAATTCTGAATGCTGCCATCATGATCA | 4168 |
| Thr147Ile | GTGTCATTGTTGTCATGACTATCCTCCTGGTGGTTCTGTATAA | |
| ACT-ATT | ATACAGGTGCTATAAGGTGAGCATGAGACACAGATC | |
| | GATCTGTGTCTCATGCTCACCTTATAGCACCTGTATTTATACA | 4169 |
| | GAACCACCAGGAGGATAGTCATGACAACAATGACACTGATCA | |
| | TGATGGCAGCATTCAGAATTGAGTGCAGGGCTCTCT | |
| | TGTCATGACTATCCTCC | 4170 |
| | GGAGGATAGTCATGACA | 4171 |
| Alzheimer disease | CTTTTTAAGGGTTGTGGGACCTGTTAATTATATTGAAATGCTTT | 4172 |
| His163Arg | CTTTTCTAGGTCATCCATGCCTGGCTTATTATATCATCTCTATT | |
| CAT-CGT | GTTGCTGTTCTTTTTTTCATTCATTTACTTGGG | |
| | CCCAAGTAAATGAATGAAAAAAAGAACAGCAACAATAGAGAT | 4173 |
| | GATATAATAAGCCAGGCATGGATGACCTAGAAAAGAAAGCAT | |
| | TTCAATATAATTAACAGGTCCCACAACCCTTAAAAAG | |
| | GGTCATCCATGCCTGGC | 4174 |
| | GCCAGGCATGGATGACC | 4175 |
| Alzheimer disease | ACTTTTTAAGGGTTGTGGGACCTGTTAATTATATTGAAATGCT | 4176 |
| His163Tyr | TTCTTTTCTAGGTCATCCATGCCTGGCTTATTATATCATCTCTA | |
| cCAT-TAT | TTGTTGCTGTTCTTTTTTTCATTCATTTACTTGG | |
| | CCAAGTAAATGAATGAAAAAAAGAACAGCAACAATAGAGATGA | 4177 |
| | TATAATAAGCCAGGCATGGATGACCTAGAAAAGAAAGCATTTC | |
| | AATATAATTAACAGGTCCCACAACCCTTAAAAAGT | |
| | AGGTCATCCATGCCTGG | 4178 |
| | CCAGGCATGGATGACCT | 4179 |
| Alzheimer disease | AGGGTTGTGGGACCTGTTAATTATATTGAAATGCTTTCTTTTC | 4180 |
| Trp165Cys | TAGGTCATCCATGCCTGGCTTATTATATCATCTCTATTGTTGCT | |
| TGGc-TGC | GTTCTTTTTTTCATTCATTTACTTGGGGTAAGTT | |
| | AACTTACCCCAAGTAAATGAATGAAAAAAAGAACAGCAACAAT | 4181 |
| | AGAGATGATATAATAAGCCAGGCATGGATGACCTAGAAAAGA | |
| | AAGCATTTCAATATAATTAACAGGTCCCACAACCCT | |
| | CATGCCTGGCTTATTAT | 4182 |
| | ATAATAAGCCAGGCATG | 4183 |
| Alzheimer disease | ACCTGTTAATTATATTGAAATGCTTTCTTTTCTAGGTCATCCAT | 4184 |
| Ser169Leu | GCCTGGCTTATTATATCATCTCTATTGTTGCTGTTCTTTTTTTC | |
| TCA-TTA | ATTCATTTACTTGGGGTAAGTTGTGAAATTTTT | |
| | AAAAATTTCACAACTTACCCCAAGTAAATGAATGAAAAAAAGA | 4185 |
| | ACAGCAACAATAGAGATGATATAATAAGCCAGGCATGGATGA | |
| | CCTAGAAAAGAAAGCATTTCAATATAATTAACAGGT | |
| | TATTATATCATCTCTAT | 4186 |
| | ATAGAGATGATATAATA | 4187 |
| Alzheimer disease | TAATTATATTGAAATGCTTTCTTTTCTAGGTCATCCATGCCTGG | 4188 |
| Leu171Pro | CTTATTATATCATCTCTATTGTTGCTGTTCTTTTTTTCATTCATT | |
| CTA-CCA | TACTTGGGGTAAGTTGTGAAATTTTTGGTCTG | |
| | CAGACCAAAAATTTCACAACTTACCCCAAGTAAATGAATGAAA | 4189 |
| | AAAAGAACAGCAACAATAGAGATGATATAATAAGCCAGGCAT | |
| | GGATGACCTAGAAAAGAAAGCATTTCAATATAATTA | |
| | ATCATCTCTATTGTTGC | 4190 |
| | GCAACAATAGAGATGAT | 4191 |
| Alzheimer disease | TATTGAAATGCTTTCTTTTCTAGGTCATCCATGCCTGGCTTATT | 4192 |
| Leu173Trp | ATATCATCTCTATTGTTGCTGTTCTTTTTTTCATTCATTTACTTG | |
| TTG-TGG | GGGTAAGTTGTGAAATTTTTGGTCTGTCTTTC | |
| | GAAAGACAGACCAAAAATTTCACAACTTACCCCAAGTAAATGA | 4193 |
| | ATGAAAAAAAGAACAGCAACAATAGAGATGATATAATAAGCCA | |
| | GGCATGGATGACCTAGAAAAGAAAGCATTTCAATA | |
| | TCTATTGTTGCTGTTCT | 4194 |
| | AGAACAGCAACAATAGA | 4195 |
| Alzheimer disease | TATAACGTTGCTGTGGACTACATTACTGTTGCACTCCTGATCT | 4196 |
| Gly209Arg | GGAATTTTGGTGTGGTGGGAATGATTTCCATTCACTGGAAAG | |
| gGGA-AGA | GTCCACTTCGACTCCAGCAGGCATATCTCATTATGA | |
| | TCATAATGAGATATGCCTGCTGGAGTCGAAGTGGACCTTTCC | 4197 |
| | AGTGAATGGAAATCATTCCCACCACACCAAAATTCCAGATCAG | |
| | GAGTGCAACAGTAATGTAGTCCACAGCAACGTTATA | |
| | GTGTGGTGGGAATGATT | 4198 |
| | AATCATTCCCACCACAC | 4199 |
| Alzheimer disease | ATAACGTTGCTGTGGACTACATTACTGTTGCACTCCTGATCTG | 4200 |
| Gly209Val | GAATTTTGGTGTGGTGGGAATGATTTCCATTCACTGGAAAGG | |
| GGA-GTA | TCCACTTCGACTCCAGCAGGCATATCTCATTATGAT | |
| | ATCATAATGAGATATGCCTGCTGGAGTCGAAGTGGACCTTTC | 4201 |
| | CAGTGAATGGAAATCATTCCCACCACACCAAAATTCCAGATCA | |
| | GGAGTGCAACAGTAATGTAGTCCACAGCAACGTTAT | |
| | TGTGGTGGGAATGATTT | 4202 |
| | AAATCATTCCCACCACA | 4203 |
| Alzheimer disease | TGGACTACATTACTGTTGCACTCCTGATCTGGAATTTTGGTGT | 4204 |
| Ile213Thr | GGTGGGAATGATTTCCATTCACTGGAAAGGTCCACTTCGACT | |
| ATT-ACT | CCAGCAGGCATATCTCATTATGATTAGTGCCCTCAT | |
| | ATGAGGGCACTAATCATAATGAGATATGCCTGCTGGAGTCGA | 4205 |
| | AGTGGACCTTTCCAGTGAATGGAAATCATTCCCACCACACCA | |
| | AAATTCCAGATCAGGAGTGCAACAGTAATGTAGTCCA | |
| | GATTTCCATTCACTGGA | 4206 |
| | TCCAGTGAATGGAAATC | 4207 |
| Alzheimer disease | CACTCCTGATCTGGAATTTTGGTGTGGTGGGAATGATTTCCAT | 4208 |
| Leu219Pro | TCACTGGAAAGGTCCACTTCGACTCCAGCAGGCATATCTCAT | |
| CTT-CCT | TATGATTAGTGCCCTCATGGCCCTGGTGTTTATCAA | |
| | TTGATAAACACCAGGGCCATGAGGGCACTAATCATAATGAGA | 4209 |
| | TATGCCTGCTGGAGTCGAAGTGGACCTTTCCAGTGAATGGAA | |
| | ATCATTCCCACCACACCAAAATTCCAGATCAGGAGTG | |
| | AGGTCCACTTCGACTCC | 4210 |
| | GGAGTCGAAGTGGACCT | 4211 |
| Alzheimer disease | ATTTCCATTCACTGGAAAGGTCCACTTCGACTCCAGCAGGCA | 4212 |
| Ala231Thr | TATCTCATTATGATTAGTGCCCTCATGGCCCTGGTGTTTATCA | |
| tGCC-ACC | AGTACCTCCCTGAATGGACTGCGTGGCTCATCTTGG | |
| | CCAAGATGAGCCACGCAGTCCATTCAGGGAGGTACTTGATAA | 4213 |
| | ACACCAGGGCCATGAGGGCACTAATCATAATGAGATATGCCT | |
| | GCTGGAGTCGAAGTGGACCTTTCCAGTGAATGGAAAT | |
| | TGATTAGTGCCCTCATG | 4214 |
| | CATGAGGGCACTAATCA | 4215 |
| Alzheimer disease | TTTCCATTCACTGGAAAGGTCCACTTCGACTCCAGCAGGCAT | 4216 |
| Ala231Val | ATCTCATTATGATTAGTGCCCTCATGGCCCTGGTGTTTATCAA | |
| GCC-GTC | GTACCTCCCTGAATGGACTGCGTGGCTCATCTTGGC | |
| | GCCAAGATGAGCCACGCAGTCCATTCAGGGAGGTACTTGATA | 4217 |
| | AACACCAGGGCCATGAGGGCACTAATCATAATGAGATATGCC | |
| | TGCTGGAGTCGAAGTGGACCTTTCCAGTGAATGGAAA | |
| | GATTAGTGCCCTCATGG | 4218 |
| | CCATGAGGGCACTAATC | 4219 |
| Alzheimer disease | TTCACTGGAAAGGTCCACTTCGACTCCAGCAGGCATATCTCA | 4220 |
| Met233Thr | TTATGATTAGTGCCCTCATGGCCCTGGTGTTTATCAAGTACCT | |
| ATG-ACG | CCCTGAATGGACTGCGTGGCTCATCTTGGCTGTGAT | |
| | ATCACAGCCAAGATGAGCCACGCAGTCCATTCAGGGAGGTAC | 4221 |
| | TTGATAAACACCAGGGCCATGAGGGCACTAATCATAATGAGA | |
| | TATGCCTGCTGGAGTCGAAGTGGACCTTTCCAGTGAA | |
| | TGCCCTCATGGCCCTGG | 4222 |
| | CCAGGGCCATGAGGGCA | 4223 |
| Alzheimer disease | GGAAAGGTCCACTTCGACTCCAGCAGGCATATCTCATTATGA | 4224 |
| Leu235Pro | TTAGTGCCCTCATGGCCCTGGTGTTTATCAAGTACCTCCCTG | |
| CTG-CCG | AATGGACTGCGTGGCTCATCTTGGCTGTGATTTCAGT | |
| | ACTGAAATCACAGCCAAGATGAGCCACGCAGTCCATTCAGGG | 4225 |
| | AGGTACTTGATAAACACCAGGGCCATGAGGGCACTAATCATA | |
| | ATGAGATATGCCTGCTGGAGTCGAAGTGGACCTTTCC | |
| | CATGGCCCTGGTGTTTA | 4226 |
| | TAAACACCAGGGCCATG | 4227 |
| Alzheimer disease | TCATTATGATTAGTGCCCTCATGGCCCTGGTGTTTATCAAGTA | 4228 |
| Ala246Glu | CCTCCCTGAATGGACTGCGTGGCTCATCTTGGCTGTGATTTC | |
| GCG-GAG | AGTATATGGTAAAACCCAAGACTGATAATTTGTTTG | |
| | CAAACAAATTATCAGTCTTGGGTTTTACCATATACTGAAATCA | 4229 |
| | CAGCCAAGATGAGCCACGCAGTCCATTCAGGGAGGTACTTGA | |
| | TAAACACCAGGGCCATGAGGGCACTAATCATAATGA | |
| | ATGGACTGCGTGGCTCA | 4230 |
| | TGAGCCACGCAGTCCAT | 4231 |
| Alzheimer disease | GTGCCCTCATGGCCCTGGTGTTTATCAAGTACCTCCCTGAAT | 4232 |
| Leu250Ser | GGACTGCGTGGCTCATCTTGGCTGTGATTTCAGTATATGGTA | |
| TTG-TCG | AAACCCAAGACTGATAATTTGTTTGTCACAGGAATGC | |
| | GCATTCCTGTGACAAACAAATTATCAGTCTTGGGTTTTACCAT | 4233 |
| | ATACTGAAATCACAGCCAAGATGAGCCACGCAGTCCATTCAG | |
| | GGAGGTACTTGATAAACACCAGGGCCATGAGGGCAC | |
| | GCTCATCTTGGCTGTGA | 4234 |
| | TCACAGCCAAGATGAGC | 4235 |
| Alzheimer disease | AGTTTAGCCCATACATTTTATTAGATGTCTTTTATGTTTTTCTTT | 4236 |
| Ala260Val | TTCTAGATTTAGTGGCTGTTTTGTGTCCGAAAGGTCCACTTCG | |
| GCT-GTT | TATGCTGGTTGAAACAGCTCAGGAGAGAAATGA | |
| | TCATTTCTCTCCTGAGCTGTTTCAACCAGCATACGAAGTGGAC | 4237 |
| | CTTTCGGACACAAAACAGCCACTAAATCTAGAAAAAGAAAAAC | |
| | ATAAAAGACATCTAATAAAATGTATGGGCTAAACT | |
| | TTTAGTGGCTGTTTTGT | 4238 |
| | ACAAAACAGCCACTAAA | 4239 |
| Alzheimer disease | CCCATACATTTTATTAGATGTCTTTTATGTTTTTCTTTTTCTAGA | 4240 |
| Leu262Phe | TTTAGTGGCTGTTTTGTGTCCGAAAGGTCCACTTCGTATGCTG | |
| TTGt-TTC | GTTGAAACAGCTCAGGAGAGAAATGAAACGCTT | |
| | AAGCGTTTCATTTCTCTCCTGAGCTGTTTCAACCAGCATACGA | 4241 |
| | AGTGGACCTTTCGGACACAAAACAGCCACTAAATCTAGAAAA | |
| | AGAAAAACATAAAAGACATCTAATAAAATGTATGGG | |
| | GCTGTTTTGTGTCCGAA | 4242 |
| | TTCGGACACAAAACAGC | 4243 |
| Alzheimer disease | CCATACATTTTATTAGATGTCTTTTATGTTTTTCTTTTTCTAGAT | 4244 |
| Cys263Arg | TTAGTGGCTGTTTTGTGTCCGAAAGGTCCACTTCGTATGCTG | |
| gTGT-CGT | GTTGAAACAGCTCAGGAGAGAAATGAAACGCTTT | |
| | AAAGCGTTTCATTTCTCTCCTGAGCTGTTTCAACCAGCATACG | 4245 |
| | AAGTGGACCTTTCGGACACAAAACAGCCACTAAATCTAGAAA | |
| | AAGAAAAACATAAAAGACATCTAATAAAATGTATGG | |
| | CTGTTTTGTGTCCGAAA | 4246 |
| | TTTCGGACACAAAACAG | 4247 |
| Alzheimer disease | ACATTTTATTAGATGTCTTTTATGTTTTTCTTTTTCTAGATTTAG | 4248 |
| Pro264Leu | TGGCTGTTTTGTGTCCGAAAGGTCCACTTCGTATGCTGGTTG | |
| CCG-CTG | AAACAGCTCAGGAGAGAAATGAAACGCTTTTTCC | |
| | GGAAAAAGCGTTTCATTTCTCTCCTGAGCTGTTTCAACCAGCA | 4249 |
| | TACGAAGTGGACCTTTCGGACACAAAACAGCCACTAAATCTA | |
| | GAAAAAGAAAAACATAAAAGACATCTAATAAAATGT | |
| | TTTGTGTCCGAAAGGTC | 4250 |
| | GACCTTTCGGACACAAA | 4251 |
| Alzheimer disease | GTCTTTTATGTTTTTCTTTTTCTAGATTTAGTGGCTGTTTTGTG | 4252 |
| Arg269Gly | TCCGAAAGGTCCACTTCGTATGCTGGTTGAAACAGCTCAGGA | |
| tCGT-GGT | GAGAAATGAAACGCTTTTTCCAGCTCTCATTTACT | |
| | AGTAAATGAGAGCTGGAAAAAGCGTTTCATTTCTCTCCTGAGC | 4253 |
| | TGTTTCAACCAGCATACGAAGTGGACCTTTCGGACACAAAAC | |
| | AGCCACTAAATCTAGAAAAAGAAAAACATAAAAGAC | |
| | GTCCACTTCGTATGCTG | 4254 |
| | CAGCATACGAAGTGGAC | 4255 |
| Alzheimer disease | TCTTTTATGTTTTTCTTTTTCTAGATTTAGTGGCTGTTTTGTGTC | 4256 |
| Arg269His | CGAAAGGTCCACTTCGTATGCTGGTTGAAACAGCTCAGGAGA | |
| CGT-CAT | GAAATGAAACGCTTTTTCCAGCTCTCATTTACTC | |
| | GAGTAAATGAGAGCTGGAAAAAGCGTTTCATTTCTCTCCTGA | 4257 |
| | GCTGTTTCAACCAGCATACGAAGTGGACCTTTCGGACACAAA | |
| | ACAGCCACTAAATCTAGAAAAAGAAAAACATAAAAGA | |
| | TCCACTTCGTATGCTGG | 4258 |
| | CCAGCATACGAAGTGGA | 4259 |
| Alzheimer disease | TAGTGGCTGTTTTGTGTCCGAAAGGTCCACTTCGTATGCTGG | 4260 |
| Arg278Thr | TTGAAACAGCTCAGGAGAGAAATGAAACGCTTTTTCCAGCTCT | |
| AGA-ACA | CATTTACTCCTGTAAGTATTTGAGAATGATATTGAA | |
| | TTCAATATCATTCTCAAATACTTACAGGAGTAAATGAGAGCTG | 4261 |
| | GAAAAAGCGTTTCATTTCTCTCCTGAGCTGTTTCAACCAGCAT | |
| | ACGAAGTGGACCTTTCGGACACAAAACAGCCACTA | |
| | TCAGGAGAGAAATGAAA | 4262 |
| | TTTCATTTCTCTCCTGA | 4263 |
| Alzheimer disease | CTGTTTTGTGTCCGAAAGGTCCACTTCGTATGCTGGTTGAAAC | 4264 |
| Glu280Ala | AGCTCAGGAGAGAAATGAAACGCTTTTTCCAGCTCTCATTTAC | |
| GAA-GCA | TCCTGTAAGTATTTGAGAATGATATTGAATTAGTA | |
| | TACTAATTCAATATCATTCTCAAATACTTACAGGAGTAAATGAG | 4265 |
| | AGCTGGAAAAAGCGTTTCATTTCTCTCCTGAGCTGTTTCAACC | |
| | AGCATACGAAGTGGACCTTTCGGACACAAAACAG | |
| | GAGAAATGAAACGCTTT | 4266 |
| | AAAGCGTTTCATTTCTC | 4267 |
| Alzheimer disease | CTGTTTTGTGTCCGAAAGGTCCACTTCGTATGCTGGTTGAAAC | 4268 |
| Glu280Gly | AGCTCAGGAGAGAAATGAAACGCTTTTTCCAGCTCTCATTTAC | |
| GAA-GGA | TCCTGTAAGTATTTGAGAATGATATTGAATTAGTA | |
| | TACTAATTCAATATCATTCTCAAATACTTACAGGAGTAAATGAG | 4269 |
| | AGCTGGAAAAAGCGTTTCATTTCTCTCCTGAGCTGTTTCAACC | |
| | AGCATACGAAGTGGACCTTTCGGACACAAAACAG | |
| | GAGAAATGAAACGCTTT | 4270 |
| | AAAGCGTTTCATTTCTC | 4271 |
| Alzheimer disease | TGTGTCCGAAAGGTCCACTTCGTATGCTGGTTGAAACAGCTC | 4272 |
| Leu282Arg | AGGAGAGAAATGAAACGCTTTTTCCAGCTCTCATTTACTCCTG | |
| CTT-CGT | TAAGTATTTGAGAATGATATTGAATTAGTAATCAGT | |
| | ACTGATTACTAATTCAATATCATTCTCAAATACTTACAGGAGTA | 4273 |
| | AATGAGAGCTGGAAAAAGCGTTTCATTTCTCTCCTGAGCTGTT | |
| | TCAACCAGCATACGAAGTGGACCTTTCGGACACA | |
| | TGAAACGCTTTTTCCAG | 4274 |
| | CTGGAAAAAGCGTTTCA | 4275 |
| Alzheimer disease | AAGGTCCACTTCGTATGCTGGTTGAAACAGCTCAGGAGAGAA | 4276 |
| Ala285Val | ATGAAACGCTTTTTCCAGCTCTCATTTACTCCTGTAAGTATTTG | |
| GCT-GTT | AGAATGATATTGAATTAGTAATCAGTGTAGAATTT | |
| | AAATTCTACACTGATTACTAATTCAATATCATTCTCAAATACTT | 4277 |
| | ACAGGAGTAAATGAGAGCTGGAAAAAGCGTTTCATTTCTCTC | |
| | CTGAGCTGTTTCAACCAGCATACGAAGTGGACCTT | |
| | TTTTCCAGCTCTCATTT | 4278 |
| | AAATGAGAGCTGGAAAA | 4279 |
| Alzheimer disease | GGTCCACTTCGTATGCTGGTTGAAACAGCTCAGGAGAGAAAT | 4280 |
| Leu286Val | GAAACGCTTTTTCCAGCTCTCATTTACTCCTGTAAGTATTTGA | |
| tCTC-GTC | GAATGATATTGAATTAGTAATCAGTGTAGAATTTAT | |
| | ATAAATTCTACACTGATTACTAATTCAATATCATTCTCAAATAC | 4281 |
| | TTACAGGAGTAAATGAGAGCTGGAAAAAGCGTTTCATTTCTCT | |
| | CCTGAGCTGTTTCAACCAGCATACGAAGTGGACC | |
| | TTCCAGCTCTCATTTAC | 4282 |
| | GTAAATGAGAGCTGGAA | 4283 |
| Alzheimer disease | GTGACCAACTTTTTAATATTTGTAACCTTTCCTTTTTAGGGGGA | 4284 |
| Gly384Ala | GTAAAACTTGGATTGGGAGATTTCATTTTCTACAGTGTTCTGG | |
| GGA-GCA | TTGGTAAAGCCTCAGCAACAGCCAGTGGAGACTG | |
| | CAGTCTCCACTGGCTGTTGCTGAGGCTTTACCAACCAGAACA | 4285 |
| | CTGTAGAAAATGAAATCTCCCAATCCAAGTTTTACTCCCCCTA | |
| | AAAAGGAAAGGTTACAAATATTAAAAAGTTGGTCAC | |
| | TGGATTGGGAGATTTCA | 4286 |
| | TGAAATCTCCCAATCCA | 4287 |
| Alzheimer disease | TTTGTAACCTTTCCTTTTTAGGGGGAGTAAAACTTGGATTGGG | 4288 |
| Ser390Ile | AGATTTCATTTTCTACAGTGTTCTGGTTGGTAAAGCCTCAGCA | |
| AGT-ATT | ACAGCCAGTGGAGACTGGAACACAACCATAGCCTG | |
| | CAGGCTATGGTTGTGTTCCAGTCTCCACTGGCTGTTGCTGAG | 4289 |
| | GCTTTACCAACCAGAACACTGTAGAAAATGAAATCTCCCAATC | |
| | CAAGTTTTACTCCCCCTAAAAAGGAAAGGTTACAAA | |
| | TTTCTACAGTGTTCTGG | 4290 |
| | CCAGAACACTGTAGAAA | 4291 |
| Alzheimer disease | AACCTTTCCTTTTTAGGGGGAGTAAAACTTGGATTGGGAGATT | 4292 |
| Leu392Val | TCATTTTCTACAGTGTTCTGGTTGGTAAAGCCTCAGCAACAGC | |
| tCTG-GTG | CAGTGGAGACTGGAACACAACCATAGCCTGTTTCG | |
| | CGAAACAGGCTATGGTTGTGTTCCAGTCTCCACTGGCTGTTG | 4293 |
| | CTGAGGCTTTACCAACCAGAACACTGTAGAAAATGAAATCTCC | |
| | CAATCCAAGTTTTACTCCCCCTAAAAAGGAAAGGTT | |
| | ACAGTGTTCTGGTTGGT | 4294 |
| | ACCAACCAGAACACTGT | 4295 |
| Alzheimer disease | ATTTCATTTTCTACAGTGTTCTGGTTGGTAAAGCCTCAGCAAC | 4296 |
| Asn405Ser | AGCCAGTGGAGACTGGAACACAACCATAGCCTGTTTCGTAGC | |
| AAC-AGC | CATATTAATTGTAAGTATACACTAATAAGAATGTGT | |
| | ACACATTCTTATTAGTGTATACTTACAATTAATATGGCTACGAA | 4297 |
| | ACAGGCTATGGTTGTGTTCCAGTCTCCACTGGCTGTTGCTGA | |
| | GGCTTTACCAACCAGAACACTGTAGAAAATGAAAT | |
| | AGACTGGAACACAACCA | 4298 |
| | TGGTTGTGTTCCAGTCT | 4299 |
| Alzheimer disease | TACAGTGTTCTGGTTGGTAAAGCCTCAGCAACAGCCAGTGGA | 4300 |
| Ala409Thr | GACTGGAACACAACCATAGCCTGTTTCGTAGCCATATTAATTG | |
| aGCC-ACC | TAAGTATACACTAATAAGAATGTGTCAGAGCTCTTA | |
| | TAAGAGCTCTGACACATTCTTATTAGTGTATACTTACAATTAAT | 4301 |
| | ATGGCTACGAAACAGGCTATGGTTGTGTTCCAGTCTCCACTG | |
| | GCTGTTGCTGAGGCTTTACCAACCAGAACACTGTA | |
| | CAACCATAGCCTGTTTC | 4302 |
| | GAAACAGGCTATGGTTG | 4303 |
| Alzheimer disease | GTGTTCTGGTTGGTAAAGCCTCAGCAACAGCCAGTGGAGACT | 4304 |
| Cys410Tyr | GGAACACAACCATAGCCTGTTTCGTAGCCATATTAATTGTAAG | |
| TGT-TAT | TATACACTAATAAGAATGTGTCAGAGCTCTTAATGT | |
| | ACATTAAGAGCTCTGACACATTCTTATTAGTGTATACTTACAAT | 4305 |
| | TAATATGGCTACGAAACAGGCTATGGTTGTGTTCCAGTCTCCA | |
| | CTGGCTGTTGCTGAGGCTTTACCAACCAGAACAC | |
| | CATAGCCTGTTTCGTAG | 4306 |
| | CTACGAAACAGGCTATG | 4307 |
| Alzheimer disease | TGTGAATGTGTGTCTTTCCCATCTTCTCCACAGGGTTTGTGCC | 4308 |
| Ala426Pro | TTACATTATTACTCCTTGCCATTTTCAAGAAAGCATTGCCAGC | |
| tGCC-CCC | TCTTCCAATCTCCATCACCTTTGGGCTTGTTTTCT | |
| | AGAAAACAAGCCCAAAGGTGATGGAGATTGGAAGAGCTGGC | 4309 |
| | AATGCTTTCTTGAAAATGGCAAGGAGTAATAATGTAAGGCACA | |
| | AACCCTGTGGAGAAGATGGGAAAGACACACATTCACA | |
| | TACTCCTTGCCATTTTC | 4310 |
| | GAAAATGGCAAGGAGTA | 4311 |
| Alzheimer disease | AGGGTTTGTGCCTTACATTATTACTCCTTGCCATTTTCAAGAA | 4312 |
| Pro436Gln | AGCATTGCCAGCTCTTCCAATCTCCATCACCTTTGGGCTTGTT | |
| CCA-CAA | TTCTACTTTGCCACAGATTATCTTGTACAGCCTTT | |
| | AAAGGCTGTACAAGATAATCTGTGGCAAAGTAGAAAACAAGC | 4313 |
| | CCAAAGGTGATGGAGATTGGAAGAGCTGGCAATGCTTTCTTG | |
| | AAAATGGCAAGGAGTAATAATGTAAGGCACAAACCCT | |
| | AGCTCTTCCAATCTCCA | 4314 |
| | TGGAGATTGGAAGAGCT | 4315 |
| Alzheimer disease | CAGGGTTTGTGCCTTACATTATTACTCCTTGCCATTTTCAAGA | 4316 |
| Pro436Ser | AAGCATTGCCAGCTCTTCCAATCTCCATCACCTTTGGGCTTGT | |
| tCCA-TCA | TTTCTACTTTGCCACAGATTATCTTGTACAGCCTT | |
| | AAGGCTGTACAAGATAATCTGTGGCAAAGTAGAAAACAAGCC | 4317 |
| | CAAAGGTGATGGAGATTGGAAGAGCTGGCAATGCTTTCTTGA | |
| | AAATGGCAAGGAGTAATAATGTAAGGCACAAACCCTG | |
| | CAGCTCTTCCAATCTCC | 4318 |
| | GGAGATTGGAAGAGCTG | 4319 |

### EXAMPLE 26

### Alzheimer's Disease—Presenilin—2 (PSEN2)

[0244] The attached table discloses the correcting oligonucleotide base sequences for the PSEN2 oligonucleotides of the invention.

TABLE 28
PSEN2 Mutations And Genome-Correcting Oligos

| | |
|---|---|
| Clinical Phenotype & | SEQ ID |

| | | |
|---|---|---|
| Mutation | Correcting Oligos | NO: |

| | | |
|---|---|---|
| Alzheimer disease | GATGTGGTTTCCCACAGAGAAGCCAGGAGAACGAGGAGGAC | 4320 |
| Arg62His | GGTGAGGAGGACCCTGACCGCTATGTCTGTAGTGGGGTTCC | |
| CGC-CAC | CGGGCGGCCGCCAGGCCTGGAGGAAGAGCTGACCCTCAA | |
| | TTGAGGGTCAGCTCTTCCTCCAGGCCTGGCGGCCGCCCGGG | 4321 |
| | AACCCCACTACAGACATAGCGGTCAGGGTCCTCCTCACCGTC | |
| | CTCCTCGTTCTCCTGGCTTCTCTGTGGGAAACCACATC | |
| | CCCTGACCGCTATGTCT | 4322 |
| | AGACATAGCGGTCAGGG | 4323 |
| Alzheimer disease | GCCTCGAGGAGCAGTCAGGGCCGGGAGCATCAGCCCTTTGC | 4324 |
| Thr122Pro | CTTCTCCCTCAGCATCTACACGACATTCACTGAGGACACACC | |
| cACG-CCG | CTCGGTGGGCCAGCGCCTCCTCAACTCCGTGCTGAACA | |
| | TGTTCAGCACGGAGTTGAGGAGGCGCTGGCCCACCGAGGGT | 4325 |
| | GTGTCCTCAGTGAATGTCGTGTAGATGCTGAGGGAGAAGGCA | |
| | AAGGGCTGATGCTCCCGGCCCTGACTGCTCCTCGAGGC | |
| | GCATCTACACGACATTC | 4326 |
| | GAATGTCGTGTAGATGC | 4327 |
| Alzheimer disease | ACACGCCATTCACTGAGGACACACCCTCGGTGGGCCAGCGC | 4328 |
| Asn141Ile | CTCCTCAACTCCGTGCTGAACACCCTCATCATGATCAGCGTC | |
| AAC-ATC | ATCGTGGTTATGACCATCTTCTTGGTGGTGCTCTACAA | |
| | TTGTAGAGCACCACCAAGAAGATGGTCATAACCACGATGACG | 4329 |
| | CTGATCATGATGAGGGTGTTCAGCACGGAGTTGAGGAGGCG | |
| | CTGGCCCACCGAGGGTGTGTCCTCAGTGAATGGCGTGT | |
| | CGTGCTGAACACCCTCA | 4330 |
| | TGAGGGTGTTCAGCACG | 4331 |
| Alzheimer disease | CCACTGGAAGGGCCCTCTGGTGCTGCAGCAGGCCTACCTCAT | 4332 |
| Met239Ile | CATGATCAGTGCGCTCATGGCCCTAGTGTTCATCAAGTACCTC | |
| ATGg-ATA | CCAGAGTGGTCCGCGTGGGTCATCCTGGGCGCCATC | |
| | GATGGCGCCCAGGATGACCCACGCGGACCACTCTGGGAGGT | 4333 |
| | ACTTGATGAACACTAGGGCCATGAGCGCACTGATCATGATGA | |
| | GGTAGGCCTGCTGCAGCACCAGAGGGCCCTTCCAGTGG | |
| | GCGCTCATGGCCCTAGT | 4334 |
| | ACTAGGGCCATGAGCGC | 4335 |
| Alzheimer disease | ATCCACTGGAAGGGCCCTCTGGTGCTGCAGCAGGCCTACCTC | 4336 |
| Met239Val | ATCATGATCAGTGCGCTCATGGCCCTAGTGTTCATCAAGTAC | |
| cATG-GTG | CTCCCAGAGTGGTCCGCGTGGGTCATCCTGGGCGCCA | |
| | TGGCGCCCAGGATGACCCACGCGGACCACTCTGGGAGGTAC | 4337 |
| | TTGATGAACACTAGGGCCATGAGCGCACTGATCATGATGAGG | |
| | TAGGCCTGCTGCAGCACCAGAGGGCCCTTCCAGTGGAT | |
| | GTGCGCTCATGGCCCTA | 4338 |
| | TAGGGCCATGAGCGCAC | 4339 |

### EXAMPLE 26

### Engineering Herbicide Resistant Plants

[0245] Chemical weed control is an important tool of modern agriculture and many herbicides have been developed for this purpose. Their use has resulted in substantial increases in the yields of many crops, including, for example, maize, soybeans, and cotton. Thus while the use of fertilizers and new high-yielding crop varieties have contributed greatly to the “green revolution,” chemical weed control has also been at the forefront of technological achievement.

[0246] Herbicides having broad-spectrum activity are particularly useful because they obviate the need for multiple herbicides targeting different classes of weeds. The problem with such herbicides is that they typically also affect crops which are exposed to the herbicide. One way to overcome this is to generate plants which are resistant to one or more broad-spectrum herbicides. Such herbicide-tolerant plants may reduce the need for tillage to control weeds, thereby effectively reducing soil erosion and can reduce the quantity and number of different herbicides applied in the field.

[0247] Common herbicides used, for example, include those that inhibit the enzyme 5-enolpyruvyl-3-phosphoshikimic acid synthase (EPSPS), for example N-phosphonomethyl-glycine (e.g. glyphosate), those that inhibit acetolactate synthase (ALS) activity, for example the sulfonylureas and related herbicides, and those that inhibit dihydropteroate synthase, for example methyl[(4-amino-phenyl)sulfonyl]carbamate (e.g. Asulam). Herbicide-tolerant plants can be produced by several methods, including, for example, introducing into the genome of the plant the ability to degrade the herbicide, the capacity to produce a higher level of the targeted enzyme, and/or expressing an herbicide-tolerant allele of the enzyme.

[0248] The attached tables disclose exemplary oligonucleotides base sequences which can be used to generate site-specific mutations in plant genes that confer herbicide resistance.

TABLE 28
Genome-Altering Oligos Conferring Glyphosate Resistance

Phenotype, Gene,

| | |
|---|---|
| Plant & Targeted | SEQ ID |

| | | |
|---|---|---|
| Alteration | Altering Oligos | NO: |

| | | |
|---|---|---|
| Glyphosate Resistance | AAGCGTCGGAGATTGTACTTCAACCCATTAGAGAAATCTCCGGTC | 4341 |
| EPSPS | TTATTAAGCTTCCTGCCTCCAAGTCTCTATCAAATCGGATCCTGC | |
| Arabidopsis thaliana | TTCTCGCTGCTCTGTCTGAGGTATATATCAC | |
| Gly97Ala | GTGATATATAGCTCAGACAGAGCAGCGAGAAGCAGGATCCGATT | 4342 |
| GGC-GCC | TGATAGAGACTTGGAGGCAGGAAGCTTAATAAGACCGGAGATTT | |
| | CTCTAATGGGTTGAAGTACAATCTCCGACGCTT | |
| | GCTTCCTGCCTCCAAGT | 4343 |
| | ACTTGGAGGCAGGAAGC | 4344 |
| Glyphosate Resistance | AAGCTTCAGAGATTGTGCTTCAACCAATCAGAGAAATCTCGGGTC | 4345 |
| EPSPS | TCATTAAGCTACCCGCATCCAAATCTCTCTCCAATCGGATCCTCC | |
| Brassica napus | TTCTTGCCGCTCTATCTGAGGTACATATACT | |
| Gly93Ala | AGTATATGTACCTCAGATAGAGCGGCAAGAAGGAGGATCCGATT | 4346 |
| GGA-GCA | GGAGAGAGATTTGGATGCGGGTAGCTTAATGAGACCCGAGATTT | |
| | CTCTGATTGGTTGAAGCACAATCTCTGAAGCTT | |
| | GCTACCCGCATCCAAAT | 4347 |
| | ATTTGGATGCGGGTAGC | 4348 |
| Glyphosate Resistance | AGCCCAACGAGATTGTGCTGCAACCCATCAAAGATATATCAGGC | 4349 |
| EPSPS 1 | ACTGTTAAATTGCCTGCTTCTAAATCCCTTTCCAATCGTATTCTCC | |
| Nicotiana tabacum | TTCTTGCTGCCCTTTCTAAGGGAAGGACTGT | |
| Gly95Ala | ACAGTCCTTCCCTTAGAAAGGGCAGCAAGAAGGAGAATACGATT | 4350 |
| GGT-GCT | GGAAAGGGATTTAGAAGCAGGCAATTTAACAGTGCCTGATATATC | |
| | TTTGATGGGTTGCAGCACAATCTCGTTGGGCT | |
| | ATTGCCTGCTTCTAAAT | 4351 |
| | ATTTAGAAGCAGGCAAT | 4352 |
| Glyphosate Resistance | ATTGTTTCCTTGGTACGAAATGTCCTCCTGTTCGAATTGTCAGCA | 4353 |
| EPSPS 2 | AGGGAGGCCTTCCCGCAGGGAAGGTAAAGCTCTCTGGATCAATT | |
| Nicotiana tabacum | AGCAGCCAGTACTTGACTGCTCTGCTTATGGC | |
| Gly62Ala | GCCATAAGCAGAGCAGTCAAGTACTGGCTGCTAATTGATCCAGA | 4354 |
| GGA-GCA | GAGCTTTACCTTCCCTGCGGGAAGGCCTCCCTTGCTGACAATTC | |
| | GAACAGGAGGACATTTCGTACCAAGGAAACAAT | |
| | CCTTCCCGCAGGGAAGG | 4355 |
| | CCTTCCCTGCGGGAAGG | 4356 |
| Glyphosate Resistance | ATTGTTTCCTTGGCACTGACTGCCCACCTGTTCGTGTCAATGGAA | 4357 |
| EPSPS | TCGGAGGGCTACCTGCTGGCAAGGTCAAGCTGTCTGGCTCCATC | |
| Zea mays | AGCAGTCAGTACTTGAGTGCCTTGCTGATGGC | |
| Gly168Ala | GCCATCAGCAAGGCACTCAAGTACTGACTGCTGATGGAGCCAGA | 4358 |
| GGT-GCT | CAGCTTGACCTTGCCAGCAGGTAGCCCTCCGATTCCATTGACAC | |
| | GAACAGGTGGGCAGTCAGTGCCAAGGAAACAAT | |
| | GCTACCTGCTGGCAAGG | 4359 |
| | CCTTGCCAGCAGGTAGC | 4360 |
| Glyphosate Resistance | ACTGTTTCCTTGGCACTGAATGCCCACCTGTTCGTGTCAAGGGA | 4361 |
| EPSPS | ATTGGAGGACTTCCTGCTGGCAAGGTTAAGCTCTCTGGTTCCAT | |
| Oryza sativa | CAGCAGTCAGTACTTGAGTGCCTTGCTGATGGC | |
| Gly115Ala | GCCATCAGCAAGGCACTGAAGTACTGACTGCTGATGGAACCAGA | 4362 |
| GGT-GCT | GAGCTTAACCTTGCCAGCAGGAAGTCCTCCMTTCCCTTGACAC | |
| | GAACAGGTGGGCATTCAGTGCCAAGGAAACAGT | |
| | ACTTCCTGCTGGCAAGG | 4363 |
| | CCTTGCCAGCAGGAAGT | 4364 |
| Glyphosate Resistance | AGCCTTCTGAGATAGTGTTGCAACCCATTAAAGAGATTTCAGGCA | 4365 |
| EPSPS | CTGTTAAATTGCCTGCCTCTAAATCATTATCTAATAGAATTCTCCT | |
| Petunia x hybrida | TCTTGCTGCCTTATCTGAAGGAACAACTGT | |
| Gly93Ala | ACAGTTGTTCCTTCAGATAAGGCAGCAAGAAGGAGAATTCTATTA | 4366 |
| GGC-GCC | GATAATGATTTAGAGGCAGGCAATTTAACAGTGCCTGAAATCTCT | |
| | TTAATGGGTTGCAACACTATCTCAGAAGGCT | |
| | ATTGCCTGCCTCTAAAT | 4367 |
| | ATTTAGAGGCAGGCAAT | 4368 |
| Glyphosate Resistance | AACCCCATGAGATTGTGCTAGNACCCATCAAAGATATATCTGGTA | 4369 |
| EPSPS | CTGTTAAATTACCCGCTTCGAAATCCCTTTCCAATCGTATTCTCCT | |
| Lycopersicon | TCTTGCTGCCCTTTCTGAGGGAAGGACTGT | |
| esculentum | ACAGTCCTTCCCTCAGAAAGGGCAGCAAGAAGGAGAATACGATT | 4370 |
| Gly97Ala | GGAAAGGGATTTCGAAGCGGGTAATTTAACAGTACCAGATATATC | |
| GGT-GCT | TTTGATGGGTNCTAGCACAATCTCATGGGGTT | |
| | ATTACCCGCTTCGAAAT | 4371 |
| | ATTTCGAAGCGGGTAAT | 4372 |
| Glyphosate Resistance | ATTGTTTCCTTGGCACTGACTGCCCACCTGTTCGKATCAACGGCA | 4373 |
| EPSPS | TTGGAGGGCTACCTGCTGGCAAGGTTAAGCTGTCTGGTTCCATC | |
| Lolium rigidum | AGCAGCCAATACTTGAGTTCCTTGCTGATGGC | |
| Gly107Ala | GCCATCAGCAAGGAACTCAAGTATTGGCTGCTGATGGAACCAGA | 4374 |
| GGT-GCT | CAGCTTAACCTTGCCAGCAGGTAGCCCTCCAATGCCGTTGATCG | |
| | AACAGGTGGGCAGTCAGTGCCAAGGAAACAAT | |
| | GCTACCTGCTGGCAAGG | 4375 |
| | CCTTGCCAGCAGGTAGC | 4376 |

[0249] TABLE 29

Genome-Altering Oligos Conferring Imidazolinone
and Sulfonylurea Herbicide Resistance

Phenotype, Gene,

| | |
|---|---|
| Plant & Targeted | SEQ ID |

| | | |
|---|---|---|
| Alteration | Altering Oligos | NO: |

| | | |
|---|---|---|
| Sulfonylurea | AGCGGATTAGCCGATGCGTTGTTAGATAGTGTTCCTCTTGTAGCA | 4377 |
| Resistance | ATCACAGGACAAGTCTCTCGTCGTATGATTGGTACAGATGCGTTT | |
| ALS | CAAGAGACTCCGATTGTTGAGGTAACGCGTT | |
| Arabidopsis thaliana | AACGCGTTACCTCAACAATCGGAGTCTCTTGAAACGCATCTGTAC | 4378 |
| Pro197Ser | CAATCATACGACGAGAGACTTGTCCTGTGATTGCTACAAGAGGAA | |
| CCT-TCT | CACTATCTAACAACGCATCGGCTAATCCGCT | |
| | GACAAGTCTCTCGTCGT | 4379 |
| | ACGACGAGAGACTTGTC | 4380 |
| Sulfonylurea | AGCGGATTAGCCGATGCGTTGTTAGATAGTGTTCCTCTTGTAGCA | 4381 |
| Resistance | ATCACAGGACAAGTCCAGCGTCGTATGATTGGTACAGATGCGTTT | |
| ALS | CAAGAGACTCCGATTGTTGAGGTAACGCGTT | |
| Arabidopsis thaliana | AACGCGTTACCTCAACAATCGGAGTCTCTTGAAACGCATCTGTAC | 4382 |
| Pro197Gln | CAATCATACGACGCTGGACTTGTCCTGTGATTGCTACAAGAGGAA | |
| CCT-CAG | CACTATCTAACAACGCATCGGCTAATCCGCT | |
| | ACAAGTCCAGCGTCGTC | 4383 |
| | TACGACGCTGGACTTGT | 4384 |
| Sulfonylurea | AGCGGATTAGCCGATGCGTTGTTAGATAGTGTTCCTCTTGTAGCA | 4385 |
| Resistance | ATCACAGGACAAGTCCAACGTCGTATGATTGGTACAGATGCGTTT | |
| ALS | CAAGAGACTCCGATTGTTGAGGTAACGCGTT | |
| Arabidopsis thaliana | AACGCGTTACCTCAACAATCGGAGTCTCTTGAAACGCATCTGTAC | 4386 |
| Pro197Gln | CAATCATACGACGTTGGACTTGTCCTGTGATTGCTACAAGAGGAA | |
| CCT-CAA | CACTATCTAACAACGCATCGGCTAATCCGCT | |
| | ACAAGTCCAACGTCGTA | 4387 |
| | TACGACGTTGGACTTGT | 4388 |
| Imidazolinone | GACCTTACCTGTTGGATGTGATTTGTCCGCACCAAGAACATGTGT | 4389 |
| Resistance | TGCCGATGATCCCGAACGGTGGCACTTTCAACGATGTCATAACGG | |
| ALS | AAGGAGATGGCCGGATTAAATACTGAGAGAT | |
| Arabidopsis thaliana | ATCTCTCAGTATTTAATCCGGCCATCTCCTTCCGTTATGACATCGT | 4390 |
| Ser653Asn | TGAAAGTGCCACCGTTCGGGATCATCGGCAACACATGTTCTTGGT | |
| AGT-AAC | GCGGACAAATCACATCCAACAGGTAAGGTC | |
| | GATCCCGAACGGTGGCA | 4391 |
| | TGCCACCGTTCGGGATC | 4392 |
| Imidazolinone | GACCTTACCTGTTGGATGTGATTTGTCCGCACCAAGAACATGTGT | 4393 |
| Resistance | TGCCGATGATCCCGAATGGTGGCACTTTCAACGATGTCATAACGG | |
| ALS | AAGGAGATGGCCGGATTAAATACTGAGAGAT | |
| Arabidopsis thaliana | ATCTCTCAGTATTTAATCCGGCCATCTCCTTCCGTTATGACATCGT | 4394 |
| Ser653Asn | TGAAAGTGCCACCATTCGGGATCATCGGCAACACATGTTCTTGGT | |
| AGT-AAT | GCGGACAAATCACATCCAACAGGTAAGGTC | |
| | GATCCCGAATGGTGGCA | 4395 |
| | TGCCACCATTCGGGATC | 4396 |
| Sulfonylurea | TCCGCGCTCGCCGACGCGCTGCTCGACTCCGTCCCGATGGTCGC | 4397 |
| Resistance | CATCACGGGCCAGGTCTCCCGCCGCATGATCGGCACCGACGCCT | |
| ALS | TCCAGGAGACGCCCATAGTCGAGGTCACCCGCT | |
| Oryza sativa | AGCGGGTGACCTCGACTATGGGCGTCTCCTGGAAGGCGTCGGTG | 4398 |
| Pro171Ser | CCGATCATGCGGCGGGAGACCTGGCCCGTGATGGCGACCATCG | |
| CCC-TCC | GGACGGAGTCGAGCAGCGCGTCGGCGAGCGCGGA | |
| | GCCAGGTCTCCCGCCGC | 4399 |
| | GCGGCGGGAGACCTGGC | 4400 |
| Sulfonylurea | CCGCGCTCGCCGACGCGCTGCTCGACTCCGTCCCGATGGTCGCC | 4401 |
| Resistance | ATCACGGGCCAGGTCCAACGCCGCATGATCGGCACCGACGCCTT | |
| ALS | CCAGGAGACGCCCATAGTCGAGGTCACCCGCTC | |
| Oryza sativa | GAGCGGGTGACCTCGACTATGGGCGTCTCCTGGAAGGCGTCGGT | 4402 |
| Pro171Gln | GCCGATCATGCGGCGTTGGACCTGGCCCGTGATGGCGACCATCG | |
| CCC-CAA | GGACGGAGTCGAGCAGCGCGTCGGCGAGCGCGG | |
| | CCAGGTCCAACGCCGCA | 4403 |
| | TGCGGCGTTGGACCTGG | 4404 |
| Sulfonylurea | CCGCGCTCGCCGACGCGCTGCTCGACTCCGTCCCGATGGTCGCC | 4405 |
| Resistance | ATCACGGGCCAGGTCCAGCGCCGCATGATCGGCACCGACGCCTT | |
| ALS | CCAGGAGACGCCCATAGTCGAGGTCACCCGCTC | |
| Oryza sativa | GAGCGGGTGACCTCGACTATGGGCGTCTCCTGGAAGGCGTCGGT | 4406 |
| Pro171Gln | GCCGATCATGCGGCGCTGGACCTGGCCCGTGATGGCGACCATCG | |
| CCC-CAG | GGACGGAGTCGAGCAGCGCGTCGGCGAGCGCGG | |
| | CCAGGTCCAGCGCCGCA | 4407 |
| | TGCGGCGCTGGACCTGG | 4408 |
| Imidazolinone | GGCCATACTTGTTGGATATCATCGTCCCGCACCAGGAGCATGTGC | 4409 |
| Resistance | TGCCTATGATCCCAAATGGGGGCGCATTCAAGGACATGATCCTGG | |
| ALS | ATGGTGATGGCAGGACTGTGTATTAATCTAT | |
| Oryza sativa | ATAGATTAATACACAGTCCTGCCATCACCATCCAGGATCATGTCCT | 4410 |
| Ile627Asn | TGAATGCGCCCCCATTTGGGATCATAGGCAGCACATGCTCCTGGT | |
| ATT-AAT | GCGGGACGATGATATCCAACAAGTATGGCC | |
| | GATCCCAAATGGGGGCG | 4411 |
| | CGCCCCCATTTGGGATC | 4412 |
| Sulfonylurea | TCCGCGCTCGCCGACGCGCTGCTCGATTCCGTCCCCATGGTCGC | 4413 |
| Resistance | CATCACGGGACAGGTGTCGCGACGCATGATTGGCACCGACGCCT | |
| ALS | TCCAGGAGACGCCCATCGTCGAGGTCACCCGCT | |
| Zea mays | AGCGGGTGACCTCGACGATGGGCGTCTCCTGGAAGGCGTCGGT | 4414 |
| Pro165Ser | GCCAATCATGCGTCGCGACACCTGTCCCGTGATGGCGACCATGG | |
| CCG-TCG | GGACGGAATCGAGCAGCGCGTCGGCGAGCGCGGA | |
| | GACAGGTGTCGCGACGC | 4415 |
| | GCGTCGCGACACCTGTC | 4416 |
| Sulfonylurea | CCGCGCTCGCCGACGCGCTGCTCGATTCCGTCCCCATGGTCGCC | 4417 |
| Resistance | ATCACGGGACAGGTGCAGCGACGCATGATTGGCACCGACGCCTT | |
| ALS | CCAGGAGACGCCCATCGTCGAGGTCACCCGCTC | |
| Zea mays | GAGCGGGTGACCTCGACGATGGGCGTCTCCTGGAAGGCGTCGG | 4418 |
| Pro165Gln | TGCCAATCATGCGTCGCTGCACCTGTCCCGTGATGGCGACCATG | |
| CCG-CAG | GGGACGGAATCGAGCAGCGCGTCGGCGAGCGCGG | |
| | ACAGGTGCAGCGACGCA | 4419 |
| | TGCGTCGCTGCACCTGT | 4420 |
| Imidazolinone | GGCCGTACCTCTTGGATATAATCGTCCCACACCAGGAGCATGTGT | 4421 |
| Resistance | TGCCTATGATCCCTAATGGTGGGGCTTTCAAGGATATGATCCTGG | |
| ALS | ATGGTGATGGCAGGACTGTGTACTGATCTAA | |
| Zea mays | TTAGATCAGTACACAGTCCTGCCATCACCATCCAGGATCATATCCT | 4422 |
| Ser621Asn | TGAAAGCCCCACCATTAGGGATCATAGGCAACACATGCTCCTGGT | |
| AGT-AAT | GTGGGACGATTATATCCAAGAGGTACGGCC | |
| | GATCCCTAATGGTGGGG | 4423 |
| | CCCCACCATTAGGGATC | 4424 |
| Imidazolinone | GGCCGTACCTCTTGGATATAATCGTCCCACACCAGGAGCATGTGT | 4425 |
| Resistance | TGCCTATGATCCCTAACGGTGGGGCTTTCAAGGATATGATCCTGG | |
| ALS | ATGGTGATGGCAGGACTGTGTACTGATCTAA | |
| Zea mays | TTAGATCAGTACACAGTCCTGCCATCACCATCCAGGATCATATCCT | 4426 |
| Ser621Asn | TGAAAGCCCCACCGTTAGGGATCATAGGCAACACATGCTCCTGGT | |
| AGT-AAC | GTGGGACGATTATATCCAAGAGGTACGGCC | |
| | GATCCCTAACGGTGGGG | 4427 |
| | CCCCACCGTTAGGGATC | 4428 |
| Sulfonylurea | TCCGCGCTCGCCGACGCCCTCCTCGACTCCATCCCCATGGTGGC | 4429 |
| Resistance | CATCACGGGGCAGGTCTCGCGCCGCATGATCGGCACGGACGCCT | |
| ALS | TCCAGGAGACGCCCATCGTCGAGGTCACCCGCT | |
| Lolium multiflorum | AGCGGGTGACCTCGACGATGGGCGTCTCCTGGAAGGCGTCCGTG | 4430 |
| Pro167Ser | CCGATCATGCGGCGCGAGACCTGCCCCGTGATGGCCACCATGG | |
| CCG-TCG | GGATGGAGTCGAGGAGGGCGTCGGCGAGCGCGGA | |
| | GGCAGGTCTCGCGCCGC | 4431 |
| | GCGGCGCGAGACCTGCC | 4432 |
| Sulfonylurea | CCGCGCTCGCCGACGCCCTCCTCGACTCCATCCCCATGGTGGCC | 4433 |
| Resistance | ATCACGGGGCAGGTCCAGCGCCGCATGATCGGCACGGACGCCTT | |
| ALS | CCAGGAGACGCCCATCGTCGAGGTCACCCGCTC | |
| Lolium multiflorum | GAGCGGGTGACCTCGACGATGGGCGTCTCCTGGAAGGCGTCCGT | 4434 |
| Pro167Gln | GCCGATCATGCGGCGCTGGACCTGCCCCGTGATGGCCACCATGG | |
| CCG-CAG | GGATGGAGTCGAGGAGGGCGTCGGCGAGCGCGG | |
| | GCAGGTCCAGCGCCGCA | 4435 |
| | TGCGGCGCTGGACCTGC | 4436 |
| Imidazolinone | CTGGGCCATACTTGTTGGATATCATCGTCCCTCACCAGGAGCATG | 4437 |
| Resistance | TGCTGCCTATGATCCCTAACGGTGGTGCTTTCAAGGACATTATCA | |
| ALS | TGGAAGGTGATGGCAGGATTTCGTATTAAAC | |
| Lolium multiflorum | GTTTAATACGAAATCCTGCCATCACCTTCCATGATAATGTCCTTGA | 4438 |
| Ser623Asn | AAGCACCACCGTTAGGGATCATAGGCAGCACATGCTCCTGGTGA | |
| AGC-AAC | GGGACGATGATATCCAACAAGTATGGCCCAG | |
| | GATCCCTAACGGTGGTG | 4439 |
| | CACCACCGTTAGGGATC | 4440 |
| Sulfonylurea | TCCGCGCTCGCCGACGCTCTCCTCGACTCCATCCCCATGGTCGC | 4441 |
| Resistance | CATCACGGGCCAGGTCTCACGCCGCATGATCGGCACGGACGCGT | |
| ALS | TCCAGGAGACGCCCATAGTGGAGGTCACGCGCT | |
| Hordeum vulgare | AGCGCGTGACCTCCACTATGGGCGTCTCCTGGAACGCGTCCGTG | 4442 |
| Pro68Ser | CCGATCATGCGGCGTGAGACCTGGCCCGTGATGGCGACCATGG | |
| CCA-TCA | GGATGGAGTCGAGGAGAGCGTCGGCGAGCGCGGA | |
| | GCCAGGTCTCACGCCGC | 4443 |
| | GCGGCGTGAGACCTGGC | 4444 |
| Sulfonylurea | CCGCGCTCGCCGACGCTCTCCTCGACTCCATCCCCATGGTCGCC | 4445 |
| Resistance | ATCACGGGCCAGGTCCAACGCCGCATGATCGGCACGGACGCGTT | |
| ALS | CCAGGAGACGCCCATAGTGGAGGTCACGCGCTC | |
| Hordeum vulgare | GAGCGCGTGACCTCCACTATGGGCGTCTCCTGGAACGCGTCCGT | 4446 |
| Pro68Gln | GCCGATCATGCGGCGTTGGACCTGGCCCGTGATGGCGACCATGG | |
| CCA-CAA | GGATGGAGTCGAGGAGAGCGTCGGCGAGCGCGG | |
| | CCAGGTCCAACGCCGCA | 4447 |
| | TGCGGCGTTGGACCTGG | 4448 |
| Imidazolinone | CCCAGGGCCGTACCTGCTGGATATCATTGTCCCGCATCAGGAGC | 4449 |
| Resistance | ACGTGCTGCCTATGATCCCAAACGGTGGTGCTTTCAAGGACATGA | |
| ALS | TCATGGAGGGTGATGGCAGGACCTCGTACTGA | |
| Hordeum vulgare | TCAGTACGAGGTCCTGCCATCACCCTCCATGATCATGTCCTTGAA | 4450 |
| Ser524Asn | AGCACCACCGTTTGGGATCATAGGCAGCACGTGCTCCTGATGCG | |
| AGC-AAC | GGACAATGATATCCAGCAGGTACGGCCCTGGG | |
| | GATCCCAAACGGTGGTG | 4451 |
| | CACCACCGTTTGGGATC | 4452 |
| Sulfonylurea | AGTGGTCTCGCTGATGCAATGCTCGATAGTATCCCTCTCGTGGCG | 4453 |
| Resistance | ATCACTGGTCAAGTCTCTCGTCGGATGATCGGTACCGATGCTTTC | |
| ALS | CAGGAAACTCCAATTGTTGAGGTAACAAGGT | |
| Gossypium hirsutum | ACCTTGTTACCTCAACAATTGGAGTTTCCTGGAAAGCATCGGTAC | 4454 |
| Pro186Ser | CGATCATCCGACGAGAGACTTGACCAGTGATCGCCACGAGAGGG | |
| CCT-TCT | ATACTATCGAGCATTGCATCAGCGAGACCACT | |
| | GTCAAGTCTCTCGTCGG | 4455 |
| | CCGACGAGAGACTTGAC | 4456 |
| Sulfonylurea | GTGGTCTCGCTGATGCAATGCTCGATAGTATCCCTCTCGTGGCGA | 4457 |
| Resistance | TCACTGGTCAAGTCCAACGTCGGATGATCGGTACCGATGCTTTCC | |
| ALS | AGGAAACTCCAATTGTTGAGGTAACAAGGTC | |
| Gossypium hirsutum | GACCTTGTTACCTCAACAATTGGAGTTTCCTGGAAAGCATCGGTA | 4458 |
| Pro186Gln | CCGATCATCCGACGTTGGACTTGACCAGTGATCGCCACGAGAGG | |
| CCT-CAA | GATACTATCGAGCATTGCATCAGCGAGACCAC | |
| | TCAAGTCCAACGTCGGA | 4459 |
| | TCCGACGTTGGACTTGA | 4460 |
| Sulfonylurea | GTGGTCTCGCTGATGCAATGCTCGATAGTATCCCTCTCGTGGCGA | 4461 |
| Resistance | TCACTGGTCAAGTCCAGCGTCGGATGATCGGTACCGATGCTTTCC | |
| ALS | AGGAAACTCCAATTGTTGAGGTAACAAGGTC | |
| Gossypium hirsutum | GACCTTGTTACCTCAACAATTGGAGTTTCCTGGAAAGCATCGGTA | 4462 |
| Pro186Gln | CCGATCATCCGACGCTGGACTTGACCAGTGATCGCCACGAGAGG | |
| CCT-CAG | GATACTATCGAGCATTGCATCAGCGAGACCAC | |
| | TCAAGTCCAGCGTCGGA | 4463 |
| | TCCGACGCTGGACTTGA | 4464 |
| Imidazolinone | GACCTTACTTGTTGGATGTGATTGTCCCACATCAAGAACATGTCCT | 4465 |
| Resistance | GCCTATGATCCCCAATGGAGGCGCTTTCAAAGATGTGATCACAGA | |
| ALS | GGGTGATGGAAGAACACAATATTGACCTCA | |
| Gossypium hirsutum | TGAGGTCAATATTGTGTTCTTCCATCACCCTCTGTGATCACATCTT | 4466 |
| Ser642Asn | TGAAAGCGCCTCCATTGGGGATCATAGGCAGGACATGTTCTTGAT | |
| AGT-AAT | GTGGGACAATCACATCCAACAAGTAAGGTC | |
| | GATCCCCAATGGAGGCG | 4467 |
| | CGCCTCCATTGGGGATC | 4468 |
| Sulfonylurea | TCTGGTCTTGCTGATGCACTTCTTGACTCAGTCCCTCTTGTCGCCA | 4469 |
| Resistance | TTACTGGGCAAGTTTCCCGGCGTATGATTGGTACTGATGCTTTTCA | |
| ALS | AGAGACTCCAATTGTTGAGGTAACTCGAT | |
| Amaranthus | ATCGAGTTACCTCAACAATTGGAGTCTCTTGAAAAGCATCAGTACC | 4470 |
| retroflexus | AATCATACGCCGGGAAACTTGCCCAGTAATGGCGACAAGAGGGA | |
| Pro192Ser | CTGAGTCAAGAAGTGCATCAGCAAGACCAGA | |
| CCC-TCC | GGCAAGTTTCCCGGCGT | 4471 |
| | ACGCCGGGAAACTTGCC | 4472 |
| Sulfonylurea | CTGGTCTTGCTGATGCACTTCTTGACTCAGTCCCTCTTGTCGCCAT | 4473 |
| Resistance | TACTGGGCAAGTTCAACGGCGTATGATTGGTACTGATGCTTTTCA | |
| ALS | AGAGACTCCAATTGTTGAGGTAACTCGATC | |
| Amaranthus | GATCGAGTTACCTCAACAATTGGAGTCTCTTGAAAAGCATCAGTAC | 4474 |
| retroflexus | CAATCATACGCCGTTGAACTTGCCCAGTAATGGCGACAAGAGGGA | |
| Pro192Gln | CTGAGTCAAGAAGTGCATCAGCAAGACCAG | |
| CCC-CAA | GCAAGTTCAACGGCGTA | 4475 |
| | TACGCCGTTGAACTTGC | 4476 |
| Sulfonylurea | CTGGTCTTGCTGATGCACTTCTTGACTCAGTCCCTCTTGTCGCCAT | 4477 |
| Resistance | TACTGGGCAAGTTCAGCGGCGTATGATTGGTACTGATGCTTTTCA | |
| ALS | AGAGACTCCAATTGTTGAGGTAACTCGATC | |
| Amaranthus | GATCGAGTTACCTCAACAATTGGAGTCTCTTGAAAAGCATCAGTAC | 4478 |
| retroflexus | CAATCATACGCCGCTGAACTTGCCCAGTAATGGCGACAAGAGGG | |
| Pro192Gln | ACTGAGTCAAGAAGTGCATCAGCAAGACCAG | |
| CCC-CAG | GCAAGTTCAGCGGCGTA | 4479 |
| | TACGCCGCTGAACTTGC | 4480 |
| Imidazolinone | GACCGTATCTGCTGGATGTAATCGTACCACATCAGGAGCATGTGC | 4481 |
| Resistance | TGCCTATGATCCCTAACGGTGCCGCCTTCAAGGACACCATAACAG | |
| ALS | AGGGTGATGGAAGAAGGGCTTATTAGTTGGT | |
| Amaranthus | ACCAACTAATAAGCCCTTCTTCCATCACCCTCTGTTATGGTGTCCT | 4482 |
| retroflexus | TGAAGGCGGCACCGTTAGGGATCATAGGCAGCACATGCTCCTGA | |
| Ser652Asn | TGTGGTACGATTACATCCAGCAGATACGGTC | |
| AGC-AAC | GATCCCTAACGGTGCCG | 4483 |
| | CGGCACCGTTAGGGATC | 4484 |
| Sulfonylurea | AGCGGCCTCGCTGACGCGCTACTGGATAGCGTCCCCATTGTTGC | 4485 |
| Resistance | TATAACAGGTCAAGTGTCACGTAGGATGATAGGTACTGATGCTTTT | |
| ALS 1 | CAGGAAACTCCTATTGTTGAGGTAACTAGAT | |
| Nicotiana tabacum | ATCTAGTTACCTCAACAATAGGAGTTTCCTGAAAAGCATCAGTACC | 4486 |
| Pro194Ser | TATCATCCTACGTGACACTTGACCTGTTATAGCAACAATGGGGAC | |
| CCA-TCA | GCTATCCAGTAGCGCGTCAGCGAGGCCGCT | |
| | GTCAAGTGTCACGTAGG | 4487 |
| | CCTACGTGACACTTGAC | 4488 |
| Sulfonylurea | GCGGCCTCGCTGACGCGCTACTGGATAGCGTCCCCATTGTTGCT | 4489 |
| Resistance | ATAACAGGTCAAGTGCAACGTAGGATGATAGGTACTGATGCTTTT | |
| ALS 1 | CAGGAAACTCCTATTGTTGAGGTAACTAGATC | |
| Nicotiana tabacum | GATCTAGTTACCTCAACAATAGGAGTTTCCTGAAAAGCATCAGTAC | 4490 |
| Pro194Gln | CTATCATCCTACGTTGCACTTGACCTGTTATAGCAACAATGGGGA | |
| CCA-CAA | CGCTATCCAGTAGCGCGTCAGCGAGGCCGC | |
| | TCAAGTGCAACGTAGGA | 4491 |
| | TCCTACGTTGCACTTGA | 4492 |
| Imidazolinone | GGCCATACTTGTTGGATGTGATTGTACCTCATCAGGAACATGTTTT | 4493 |
| Resistance | ACCTATGATTCCCAATGGCGGAGCTTTCAAAGATGTGATCACAGA | |
| ALS 1 | GGGTGACGGGAGAAGTTCCTATTGAGTTTG | |
| Nicotiana tabacum | CAAACTCAATAGGAACTTCTCCCGTCACCCTCTGTGATCACATCTT | 4494 |
| Ser650Asn | TGAAAGCTCCGCCATTGGGAATCATAGGTAAAACATGTTCCTGAT | |
| AGT-AAT | GAGGTACAATCACATCCAACAAGTATGGCC | |
| | GATTCCCAATGGCGGAG | 4495 |
| | CTCCGCCATTGGGAATC | 4496 |
| Sulfonylurea | AGTGGCCTCGCGGACGCCCTACTGGATAGCGTCCCCATTGTTGC | 4497 |
| Resistance | TATAACCGGTCAAGTGTCACGTAGGATGATCGGTACTGATGCTTT | |
| ALS 2 | TCAGGAAACTCCGATTGTTGAGGTAACTAGAT | |
| Nicotiana tabacum | ATCTAGTTACCTCAACAATCGGAGTTTCCTGAAAAGCATCAGTACC | 4498 |
| Pro191Ser | GATCATCCTACGTGACACTTGACCGGTTATAGCAACAATGGGGAC | |
| CCA-TCA | GCTATCCAGTAGGGCGTCCGCGAGGCCACT | |
| | GTCAAGTGTCACGTAGG | 4499 |
| | CCTACGTGACACTTGAC | 4500 |
| Sulfonylurea | GTGGCCTCGCGGACGCCCTACTGGATAGCGTCCCCATTGTTGCT | 4501 |
| Resistance | ATAACCGGTCAAGTGCAACGTAGGATGATCGGTACTGATGCTTTT | |
| ALS 2 | CAGGAAACTCCGATTGTTGAGGTAACTAGATC | |
| Nicotiana tabacum | GATCTAGTTACCTCAACAATCGGAGTTTCCTGAAAAGCATCAGTAC | 4502 |
| Pro191Gln | CGATCATCCTACGTTGCACTTGACCGGTTATAGCAACAATGGGGA | |
| CCA-CAA | CGCTATCCAGTAGGGCGTCCGCGAGGCCAC | |
| | TCAAGTGCAACGTAGGA | 4503 |
| | TCCTACGTTGCACTTGA | 4504 |
| Imidazolinone | GGCCATACTTGTTGGATGTGATTGTACCTCATCAGGAACATGTTCT | 4505 |
| Resistance | ACCTATGATTCCCAATGGCGGGGCTTTCAAAGATGTGATCACAGA | |
| ALS 2 | GGGTGACGGGAGAAGTTCCTATTGACTTTG | |
| Nicotiana tabacum | CAAAGTCAATAGGAACTTCTCCCGTCACCCTCTGTGATCACATCTT | 4506 |
| Ser647Asn | TGAAAGCCCCGCCATTGGGAATCATAGGTAGAACATGTTCCTGAT | |
| AGT-AAT | GAGGTACAATCACATCCAACAAGTATGGCC | |
| | GATTCCCAATGGCGGGG | 4507 |
| | CCCCGCCATTGGGAATC | 4508 |
| Sulfonylurea | AGTGGTCTTGCTGATGCTTTATTAGACAGTGTTCCAATGGTTGCTA | 4509 |
| Resistance | TTACTGGTCAAGTTTCCAGGAGAATGATTGGAACAGATGCGTTTC | |
| ALS | AAGAAACCCCTATTGTTGAGGTAACACGTT | |
| Xanthium spp. | AACGTGTTACCTCAACAATAGGGGTTTCTTGAAACGCATCTGTTCC | 4510 |
| Pro175Ser | AATCATTCTCCTGGAAACTTGACCAGTAATAGCAACCATTGGAACA | |
| CCC-TCC | CTGTCTAATAAAGCATCAGCAAGACCACT | |
| | GTCAAGTTTCCAGGAGA | 4511 |
| | TCTCCTGGAAACTTGAC | 4512 |
| Sulfonylurea | GTGGTCTTGCTGATGCTTTATTAGACAGTGTTCCAATGGTTGCTAT | 4513 |
| Resistance | TACTGGTCAAGTTCAAAGGAGAATGATTGGAACAGATGCGTTTCA | |
| ALS | AGAAACCCCTATTGTTGAGGTAACACGTTC | |
| Xanthium spp. | GAACGTGTTACCTCAACAATAGGGGTTTCTTGAAACGCATCTGTTC | 4514 |
| Pro175Gln | CAATCATTCTCCTTTGAACTTGACCAGTAATAGCAACCATTGGAAC | |
| CCC-CAA | ACTGTCTAATAAAGCATCAGCAAGACCAC | |
| | TCAAGTTCAAAGGAGAA | 4515 |
| | TTCTCCTTTGAACTTGA | 4516 |
| Sulfonylurea | GTGGTCTTGCTGATGCTTTATTAGACAGTGTTCCAATGGTTGCTAT | 4517 |
| Resistance | TACTGGTCAAGTTCAGAGGAGAATGATTGGAACAGATGCGTTTCA | |
| ALS | AGAAACCCCTATTGTTGAGGTAACACGTTC | |
| Xanthium spp. | GAACGTGTTACCTCAACAATAGGGGTTTCTTGAAACGCATCTGTTC | 4518 |
| Pro175Gln | CAATCATTCTCCTCTGAACTTGACCAGTAATAGCAACCATTGGAAC | |
| CCC-CAG | ACTGTCTAATAAAGCATCAGCAAGACCAC | |
| | TCAAGTTCAGAGGAGAA | 4519 |
| | TTCTCCTCTGAACTTGA | 4520 |
| Imidazolinone | GGGCCTTACTTGTTGGATGTGATCGTGCCCCATCAAGAACATGTG | 4521 |
| Resistance | TTGCCCATGATCCCGAATGGTGGAGGTTTCATGGATGTGATCACC | |
| ALS | GAAGGCGACGGCAGAATGAAATATTGAGCTT | |
| Xanthium spp. | AAGCTCAATATTTCATTCTGCCGTCGCCTTCGGTGATCACATCCAT | 4522 |
| Ala631Asn | GAAACCTCCACCATTCGGGATCATGGGCAACACATGTTCTTGATG | |
| GCT-AAT | GGGCACGATCACATCCAACAAGTAAGGCCC | |
| | TGATCCCGAATGGTGGA | 4523 |
| | TCCACCATTCGGGATCA | 4524 |
| Sulfonylurea | TCCGGGTTTGCTGATGCTTTGCTCGATTCCGTTCCACTGGTGGCG | 4525 |
| Resistance | ATCACGGGGCAGGTGTCGCGGCGAATGATTGGGACGGATGCTTT | |
| ALS | TCAGGAGACTCCTATTGTTGAGGTAACACGGT | |
| Bassia scoparia | ACCGTGTTACCTCAACAATAGGAGTCTCCTGAATAAGCATCCGTCC | 4526 |
| Pro189Ser | CAATCATTCGCCGCGACACCTGCCCCGTGATCGCCACCAGTGGA | |
| CCG-TCG | ACGGAATCGAGCAAAGCATCAGCAAACCCGGA | |
| | GGCAGGTGTCGCGGCGA | 4527 |
| | TCGCCGCGACACCTGCC | 4528 |
| Sulfonylurea | CCGGGTTTGCTGATGCTTTGCTCGATTCCGTTCCACTGGTGGCGA | 4529 |
| Resistance | TCACGGGGCAGGTGCAGCGGCGAATGATTGGGACGGATGCTTTT | |
| ALS | CAGGAGACTCCTATTGTTGAGGTAACACGGTC | |
| Bassia scoparia | GACCGTGTTACCTCAACAATAGGAGTCTCCTGAAAAGCATCCGTC | 4530 |
| Pro189Gln | CCAATCATTCGCCGCTGCACCTGCCCCGTGATCGCCACCAGTGG | |
| CCG-CAG | AACGGAATCGAGCAAAGCATCAGCAAACCCGG | |
| | GCAGGTGCAGCGGCGAA | 4531 |
| | TTCGCCGCTGCACCTGC | 4532 |
| Imidazolinone | GACCTTACCTGCTTGATGTGATTGTACCTCATCAGGAGCATGTGC | 4533 |
| Resistance | TGCCTATGATTCCTAATGGTGCAGCCTTCAAGGATATCATTAACGA | |
| ALS | AGGTGATGGAAGAACAAGTTATTGATGTTC | |
| Bassia scoparia | GAACATCAATAACTTGTTCTTCCATCACCTTCGTTAATGATATCCTT | 4534 |
| Ser649Asn | GAAGGCTGCACCATTAGGAATCATAGGCAGCACATGCTCCTGATG | |
| AGT-AAT | AGGTACAATCACATCAAGCAGGTAAGGTC | |
| | GATTCCTAATGGTGCAG | 4535 |
| | CTGCACCATTAGGAATC | 4536 |
| Sulfonylurea | AGCGGGTTAGCAGACGCGATGCTTGACAGTGTTCCTCTTGTCGCC | 4537 |
| Resistance | ATTACAGGACAGGTCTCTCGCCGGATGATCGGTACTGACGCCTTC | |
| ALS 1 | CAAGAGACACCAATCGTTGAGGTAACGAGGT | |
| Brassica napus | ACCTCGTTACCTCAACGATTGGTGTCTCTTGGAAGGCGTCAGTAC | 4538 |
| Pro182Ser | CGATCATCCGGCGAGAGACCTGTCCTGTAATGGCGACAAGAGGA | |
| CCT-TCT | ACACTGTCAAGCATCGCGTCTGCTAACCCGCT | |
| | GACAGGTCTCTCGCCGG | 4539 |
| | CCGGCGAGAGACCTGTC | 4540 |
| Sulfonylurea | GCGGGTTAGCAGACGCGATGCTTGACAGTGTTCCTCTTGTCGCCA | 4541 |
| Resistance | TTACAGGACAGGTCCAACGCCGGATGATCGGTACTGACGCCTTC | |
| ALS 1 | CAAGAGACACCAATCGTTGAGGTAACGAGGTC | |
| Brassica napus | GACCTCGTTACCTCAACGATTGGTGTCTCTTGGAAGGCGTCAGTA | 4542 |
| Pro182Gln | CCGATCATCCGGCGTTGGACCTGTCCTGTAATGGCGACAAGAGG | |
| CCT-CAA | AACACTGTCAAGCATCGCGTCTGCTAACCCGC | |
| | ACAGGTCCAACGCCGGA | 4543 |
| | TCCGGCGTTGGACCTGT | 4544 |
| Sulfonylurea | GCGGGTTAGCAGACGCGATGCTTGACAGTGTTCCTCTTGTCGCCA | 4545 |
| Resistance | TTACAGGACAGGTCCAGCGCCGGATGATCGGTACTGACGCCTTC | |
| ALS 1 | CAAGAGACACCAATCGTTGAGGTAACGAGGTC | |
| Brassica napus | GACCTCGTTACCTCAACGATTGGTGTCTCTTGGAAGGCGTCAGTA | 4546 |
| Pro182Gln | CCGATCATCCGGCGCTGGACCTGTCCTGTAATGGCGACAAGAGG | |
| CCT-CAG | AACACTGTCAAGCATCGCGTCTGCTAACCCGC | |
| | ACAGGTCCAGCGCCGGA | 4547 |
| | TCCGGCGCTGGACCTGT | 4548 |
| Imidazolinone | GACCATACCTGTTGGATGTGATATGTCCGCACCAAGAACATGTGT | 4549 |
| Resistance | TACCGATGATCCCAAATGGTGGCACTTTCAAAGATGTAATAACAG | |
| ALS 1 | AAGGGGATGGTCGCACTAAGTACTGAGAGAT | |
| Brassica napus | ATCTCTCAGTACTTAGTGCGACCATCCCCTTCTGTTATTACATCTTT | 4550 |
| Ser638Asn | GAAAGTGCCACCATTTGGGATCATCGGTAACACATGTTCTTGGTG | |
| AGT-AAT | CGGACATATCACATCCAACAGGTATGGTC | |
| | GATCCCAAATGGTGGCA | 4551 |
| | TGCCACCATTTGGGATC | 4552 |
| Sulfonylurea | CAGCGGGTTAGCAGACGCGATGCTTGACAGTGTTCCTCTTGTCGC | 4553 |
| Resistance | CATTACAGGACAGGTTCCTCGCCGGATGATCGGTACTGACGCCTT | |
| ALS 2 | CCAAGAGACACCAATCGTTGAGGTAACGAGG | |
| Brassica napus | CCTCGTTACCTCAACGATTGGTGTCTCTTGGAAGGCGTCAGTACC | 4554 |
| Pro126Ser | GATCATCCGGCGAGGAACCTGTCCTGTAATGGCGACAAGAGGAA | |
| CCC-TCC | CACTGTCAAGCATCGCGTCTGCTAACCCGCTG | |
| | GGACAGGTTCCTCGCCG | 4555 |
| | CGGCGAGGAACCTGTCC | 4556 |
| Sulfonylurea | AGCGGGTTAGCAGACGCGATGCTTGACAGTGTTCCTCTTGTCGCC | 4557 |
| Resistance | ATTACAGGACAGGTCACTCGCCGGATGATCGGTACTGACGCCTTC | |
| ALS 2 | CAAGAGACACCAATCGTTGAGGTAACGAGGT | |
| Brassica napus | ACCTCGTTACCTCAACGATTGGTGTCTCTTGGAAGGCGTCAGTAC | 4558 |
| Pro126Gln | CGATCATCCGGCGAGTGACCTGTCCTGTAATGGCGACAAGAGGA | |
| CCC-CAG | ACACTGTCAAGCATCGCGTCTGCTAACCCGCT | |
| | GACAGGTCACTCGCCGG | 4559 |
| | CCGGCGAGTGACCTGTC | 4560 |
| Imidazolinone | GACCATACCTGTTGGATGTGATATGTCCGCACCAAGAACATGTGT | 4561 |
| Resistance | TACCGATGATCCCAAATGGTGGCACTTTCAAAGATGTAATAACAG | |
| ALS 2 | AAGGGGATGGTCGCACTAAGTACTGAGAGAT | |
| Brassica napus | ATCTCTCAGTACTTAGTGCGACCATCCCCTTCTGTTATTACATCTTT | 4562 |
| Ser582Asn | GAAAGTGCCACCATTTGGGATCATCGGTAACACATGTTCTTGGTG | |
| AGT-AAT | CGGACATATCACATCCAACAGGTATGGTC | |
| | GATCCCAAATGGTGGCA | 4563 |
| | TGCCACCATTTGGGATC | 4564 |
| Sulfonylurea | AGCGGGTTAGCCGACGCGATGCTTGACAGTGTTCCTCTCGTCGC | 4565 |
| Resistance | CATCACAGGACAGGTCTCTCGCCGGATGATCGGTACTGACGCGT | |
| ALS 3 | TCCAAGAGACGCCAATCGTTGAGGTAACGAGGT | |
| Brassica napus | ACCTCGTTACCTCAACGATTGGCGTCTCTTGGAACGCGTCAGTAC | 4566 |
| Pro179Ser | CGATCATCCGGCGAGAGACCTGTCCTGTGATGGCGACGAGAGGA | |
| CCT-TCT | ACACTGTCAAGCATCGCGTCGGCTAACCCGCT | |
| | GACAGGTCTCTCGCCGG | 4567 |
| | CCGGCGAGAGACCTGTC | 4568 |
| Sulfonylurea | GCGGGTTAGCCGACGCGATGCTTGACAGTGTTCCTCTCGTCGCC | 4569 |
| Resistance | ATCACAGGACAGGTCCAACGCCGGATGATCGGTACTGACGCGTT | |
| ALS 3 | CCAAGAGACGCCAATCGTTGAGGTAACGAGGTC | |
| Brassica napus | GACCTCGTTACCTCAACGATTGGCGTCTCTTGGAACGCGTCAGTA | 4570 |
| Pro179Gln | CCGATCATCCGGCGTTGGACCTGTCCTGTGATGGCGACGAGAGG | |
| CCT-CAA | AACACTGTCAAGCATCGCGTCGGCTAACCCGC | |
| | ACAGGTCCAACGCCGGA | 4571 |
| | TCCGGCGTTGGACCTGT | 4572 |
| Sulfonylurea | GCGGGTTAGCCGACGCGATGCTTGACAGTGTTCCTCTCGTCGCC | 4573 |
| Resistance | ATCACAGGACAGGTCCAGCGCCGGATGATCGGTACTGACGCGTT | |
| ALS 3 | CCAAGAGACGCCAATCGTTGAGGTAACGAGGTC | |
| Brassica napus | GACCTCGTTACCTCAACGATTGGCGTCTCTTGGAACGCGTCAGTA | 4574 |
| Pro179Gln | CCGATCATCCGGCGCTGGACCTGTCCTGTGATGGCGACGAGAGG | |
| CCT-CAG | AACACTGTCAAGCATCGCGTCGGCTAACCCGC | |
| | ACAGGTCCAGCGCCGGA | 4575 |
| | TCCGGCGCTGGACCTGT | 4576 |
| Imidazolinone | GACCGTACCTGTTGGATGTCATCTGTCCGCACCAAGAACATGTGT | 4577 |
| Resistance | TACCGATGATCCCAAATGGTGGCACTTTCAAAGATGTAATAACCG | |
| ALS 3 | AAGGGGATGGTCGCACTAAGTACTGAGAGAT | |
| Brassica napus | ATCTCTCAGTACTTAGTGCGACCATCCCCTTCGGTTATTACATCTT | 4578 |
| Ser635Asn | TGAAAGTGCCACCATTTGGGATCATCGGTAACACATGTTCTTGGT | |
| AGT-AAT | GCGGACAGATGACATCCAACAGGTACGGTC | |
| | GATCCCAAATGGTGGCA | 4579 |
| | TGCCACCATTTGGGATC | 4580 |
| Sulfonylurea | TCCGCGCTCGCCGACGCGCTGCTCGACTCCGTCCCGATGGTCGC | 4581 |
| Resistance | CATCACGGGCCAGGTCTCCCGCCGCATGATCGGCACCGACGCCT | |
| ALS | TCCAGGAGACGCCCATAGTCGAGGTCACCCGCT | |
| Oryza sativa | AGCGGGTGACCTCGACTATGGGCGTCTCCTGGAAGGCGTCGGTG | 4582 |
| Pro171Ser | CCGATCATGCGGCGGGAGACCTGGCCCGTGATGGCGACCATCG | |
| CCC-TCC | GGACGGAGTCGAGCAGCGCGTCGGCGAGCGCGGA | |
| | GCCAGGTCTCCCGCCGC | 4583 |
| | GCGGCGGGAGACCTGGC | 4584 |
| Sulfonylurea | CCGCGCTCGCCGACGCGCTGCTCGACTCCGTCCCGATGGTCGCC | 4585 |
| Resistance | ATCACGGGCCAGGTCCAACGCCGCATGATCGGCACCGACGCCTT | |
| ALS | CCAGGAGACGCCCATAGTCGAGGTCACCCGCTC | |
| Oryza sativa | GAGCGGGTGACCTCGACTATGGGCGTCTCCTGGAAGGCGTCGGT | 4586 |
| Pro171Gln | GCCGATCATGCGGCGTTGGACCTGGCCCGTGATGGCGACCATCG | |
| CCC-CAA | GGACGGAGTCGAGCAGCGCGTCGGCGAGCGCGG | |
| | CCAGGTCCAACGCCGCA | 4587 |
| | TGCGGCGTTGGACCTGG | 4588 |
| Sulfonylurea | CCGCGCTCGCCGACGCGCTGCTCGACTCCGTCCCGATGGTCGCC | 4589 |
| Resistance | ATCACGGGCCAGGTCCAGCGCCGCATGATCGGCACCGACGCCTT | |
| ALS | CCAGGAGACGCCCATAGTCGAGGTCACCCGCTC | |
| Oryza sativa | GAGCGGGTGACCTCGACTATGGGCGTCTCCTGGAAGGCGTCGGT | 4590 |
| Pro171Gln | GCCGATCATGCGGCGCTGGACCTGGCCCGTGATGGCGACCATCG | |
| CCC-CAG | GGACGGAGTCGAGCAGCGCGTCGGCGAGCGCGG | |
| | CCAGGTCCAGCGCCGCA | 4591 |
| | TGCGGCGCTGGACCTGG | 4592 |
| Imidazolinone | GGCCATACTTGTTGGATATCATCGTCCCGCACCAGGAGCATGTGC | 4593 |
| Resistance | TGCCTATGATCCCAAATGGGGGCGCATTCAAGGACATGATCCTGG | |
| ALS | ATGGTGATGGCAGGACTGTGTATTAATCTAT | |
| Oryza sativa | ATAGATTAATACACAGTCCTGCCATCACCATCCAGGATCATGTCCT | 4594 |
| Ser627Asn | TGAATGCGCCCCCATTTGGGATCATAGGCAGCACATGCTCCTGGT | |
| AGT-AAT | GCGGGACGATGATATCCAACAAGTATGGCC | |
| | GATCCCAAATGGGGGCG | 4595 |
| | CGCCCCCATTTGGGATC | 4596 |
| Sulfonylurea | TCTGCGCTCGCAGACGCGTTGCTCGACTCCGTCCCCATGGTCGC | 4597 |
| Resistance | CATCACGGGACAGGTGTCGCGACGCATGATTGGCACCGACGCCT | |
| ALS | TTCAGGAGACGCCCATCGTCGAGGTCACCCGCT | |
| Zea mays | AGCGGGTGACCTCGACGATGGGCGTCTCCTGAAAGGCGTCGGTG | 4598 |
| Pro165Ser | CCAATCATGCGTCGCGACACCTGTCCCGTGATGGCGACCATGGG | |
| CCG-TCG | GACGGAGTCGAGCAACGCGTCTGCGAGCGCAGA | |
| | GACAGGTGTCGCGACGC | 4599 |
| | GCGTCGCGACACCTGTC | 4600 |
| Sulfonylurea | CTGCGCTCGCAGACGCGTTGCTCGACTCCGTCCCCATGGTCGCC | 4601 |
| Resistance | ATCACGGGACAGGTGCAGCGACGCATGATTGGCACCGACGCCTT | |
| ALS | TCAGGAGACGCCCATCGTCGAGGTCACCCGCTC | |
| Zea mays | GAGCGGGTGACCTCGACGATGGGCGTCTCCTGAAAGGCGTCGGT | 4602 |
| Pro165Gln | GCCAATCATGCGTCGCTGCACCTGTCCCGTGATGGCGACCATGG | |
| CCG-CAG | GGACGGAGTCGAGCAACGCGTCTGCGAGCGCAG | |
| | ACAGGTGCAGCGACGCA | 4603 |
| | TGCGTCGCTGCACCTGT | 4604 |
| Imidazolinone | GGCCGTACCTCTTGGATATAATCGTCCCGCACCAGGAGCATGTGT | 4605 |
| Resistance | TGCCTATGATCCCTAATGGTGGGGCTTTCAAGGATATGATCCTGG | |
| ALS | ATGGTGATGGCAGGACTGTGTATTGATCCGT | |
| Zea mays | ACGGATCAATACACAGTCCTGCCATCACCATCCAGGATCATATCC | 4606 |
| Ser621Asn | TTGAAAGCCCCACCATTAGGGATCATAGGCAACACATGCTCCTGG | |
| AGT-AAT | TGCGGGACGATTATATCCAAGAGGTACGGCC | |
| | GATCCCTAATGGTGGGG | 4607 |
| | CCCCACCATTAGGGATC | 4608 |
| Sulfonylurea | AGTGGTCTCGCTGATGCAATGCTCGATAGTATCCCTCTCGTGGCG | 4609 |
| Resistance | ATCACTGGTCAAGTCTCTCGTCGGATGATCGGTACCGATGCTTTC | |
| ALS | CAGGAAACTCCAATTGTTGAGGTAACAAGGT | |
| Gossypium hirsutum | ACCTTGTTACCTCAACAATTGGAGTTTCCTGGAAAGCATCGGTAC | 4610 |
| Pro186Ser | CGATCATCCGACGAGAGACTTGACCAGTGATCGCCACGAGAGGG | |
| CCT-TCT | ATACTATCGAGCATTGCATCAGCGAGACCACT | |
| | GTCAAGTCTCTCGTCGG | 4611 |
| | CCGACGAGAGACTTGAC | 4612 |
| Sulfonylurea | GTGGTCTCGCTGATGCAATGCTCGATAGTATCCCTCTCGTGGCGA | 4613 |
| Resistance | TCACTGGTCAAGTCCAACGTCGGATGATCGGTACCGATGCTTTCC | |
| ALS | AGGAAACTCCAATTGTTGAGGTAACAAGGTC | |
| Gossypium hirsutum | GACCTTGTTACCTCAACAATTGGAGTTTCCTGGAAAGCATCGGTA | 4614 |
| Pro186Gln | CCGATCATCCGACGTTGGACTTGACCAGTGATCGCCACGAGAGG | |
| CCT-CAA | GATACTATCGAGCATTGCATCAGCGAGACCAC | |
| | TCAAGTCCAACGTCGGA | 4615 |
| | TCCGACGTTGGACTTGA | 4616 |
| Sulfonylurea | GTGGTCTCGCTGATGCAATGCTCGATAGTATCCCTCTCGTGGCGA | 4617 |
| Resistance | TCACTGGTCAAGTCCAGCGTCGGATGATCGGTACCGATGCTTTCC | |
| ALS | AGGAAACTCCAATTGTTGAGGTAACAAGGTC | |
| Gossypium hirsutum | GACCTTGTTACCTCAACAATTGGAGTTTCCTGGAAAGCATCGGTA | 4618 |
| Pro186Gln | CCGATCATCCGACGCTGGACTTGACCAGTGATCGCCACGAGAGG | |
| CCT-CAG | GATACTATCGAGCATTGCATCAGCGAGACCAC | |
| | TCAAGTCCAGCGTCGGA | 4619 |
| | TCCGACGCTGGACTTGA | 4620 |
| Imidazolinone | GACCTTACTTGTTGGATGTGATTGTCCCACATCAAGAACATGTCCT | 4621 |
| Resistance | GCCTATGATCCCCAATGGAGGGGCTTTCAAAGATGTGATCACAGA | |
| ALS | GGGTGATGGAAGAACACAATATTGACCTCA | |
| Gossypium hirsutum | TGAGGTCAATATTGTGTTCTTCCATCACCCTCTGTGATCACATCTT | 4622 |
| Ser642Asn | TGAAAGCCCCTCCATTGGGGATCATAGGCAGGACATGTTCTTGAT | |
| AGT-AAT | GTGGGACAATCACATCCAACAAGTAAGGTC | |
| | GATCCCCAATGGAGGGG | 4623 |
| | CCCCTCCATTGGGGATC | 4624 |
| Sulfonylurea | TCTGGTCTTGCTGATGCACTTCTTGACTCAGTCCCTCTTGTCGCCA | 4625 |
| Resistance | TTACTGGGCAAGTTTCCCGGCGTATGATTGGTACTGATGCTTTTCA | |
| ALS | AGAGACTCCAATTGTTGAGGTAACTCGAT | |
| Amaranthus powellii | ATCGAGTTACCTCAACAATTGGAGTCTCTTGAAAAGCATCAGTACC | 4626 |
| Pro192Ser | AATCATACGCCGGGAAACTTGCCCAGTAATGGCGACAAGAGGGA | |
| CCC-TCC | CTGAGTCAAGAAGTGCATCAGCAAGACCAGA | |
| | GGCAAGTTTCCCGGCGT | 4627 |
| | ACGCCGGGAAACTTGCC | 4628 |
| Sulfonylurea | CTGGTCTTGCTGATGCACTTCTTGACTCAGTCCCTCTTGTCGCCAT | 4629 |
| Resistance | TACTGGGCAAGTTCAACGGCGTATGATTGGTACTGATGCTTTTCA | |
| ALS | AGAGACTCCAATTGTTGAGGTAACTCGATC | |
| Amaranthus powellii | GATCGAGTTACCTCAACAATTGGAGTCTCTTGAAAAGCATCAGTAC | 4630 |
| Pro192Gln | CAATCATACGCCGTTGAACTTGCCCAGTAATGGCGACAAGAGGGA | |
| CCC-CAA | CTGAGTCAAGAAGTGCATCAGCAAGACCAG | |
| | GCAAGTTCAACGGCGTA | 4631 |
| | TACGCCGTTGAACTTGC | 4632 |
| Sulfonylurea | CTGGTCTTGCTGATGCACTTCTTGACTCAGTCCCTCTTGTCGCCAT | 4633 |
| Resistance | TACTGGGCAAGTTCAGCGGCGTATGATTGGTACTGATGCTTTTCA | |
| ALS | AGAGACTCCAATTGTTGAGGTAACTCGATC | |
| Amaranthus powellii | GATCGAGTTACCTCAACAATTGGAGTCTCTTGAAAAGCATCAGTAC | 4634 |
| Pro192Gln | CAATCATACGCCGCTGAACTTGCCCAGTAATGGCGACAAGAGGG | |
| CCC-CAG | ACTGAGTCAAGAAGTGCATCAGCAAGACCAG | |
| | GCAAGTTCAGCGGCGTA | 4635 |
| | TACGCCGCTGAACTTGC | 4636 |
| Imidazolinone | GACCGTATCTGCTGGATGTAATCGTACCACATCAGGAGCATGTGC | 4637 |
| Resistance | TGCCTATGATCCCTAACGGTGCCGCCTTCAAGGACACCATAACAG | |
| ALS | AGGGTGATGGAAGAAGGGCTTATTAGTTGGT | |
| Amaranthus powellii | ACCAACTAATAAGCCCTTCTTCCATCACCCTCTGTTATGGTGTCCT | 4638 |
| Ser652Asn | TGAAGGCGGCACCGTTAGGGATCATAGGCAGCACATGCTCCTGA | |
| AGC-AAC | TGTGGTACGATTACATCCAGCAGATACGGTC | |
| | GATCCCTAACGGTGCCG | 4639 |
| | CGGCACCGTTAGGGATC | 4640 |

[0250] TABLE 30

Genome-Altering Oligos Conferring Porphyric
Herbicide Resistance

| | |
|---|---|
| Phenotype, Gene, | SEQ |

| | | |
|---|---|---|
| Plant & Targeted | | ID |
| Alteration | Altering Oligos | NO: |

| | | |
|---|---|---|
| Porphyric Herbicide | TCTTGCGCCCTCTTTCTGAATCTGCTGCAAATGCACTCTCAAAACT | 4641 |
| Resistant | ATATTACCCACCAATGGCAGCAGTATCTATCTCGTACCCGAAAGA | |
| PPO | AGCAATCCGAACAGAATGTTTGATAGATGG | |
| Arabidopsis thaliana | CCATCTATCAAACATTCTGTTCGGATTGCTTCTTTCGGGTACGAGA | 4642 |
| Val365Met | TAGATACTGCTGCCATTGGTGGGTAATATAGTTTTGAGAGTGCATT | |
| GTT-ATG | TGCAGCAGATTCAGAAAGAGGGCGCAAGA | |
| | CCCACCAATGGCAGCAG | 4643 |
| | CTGCTGCCATTGGTGGG | 4644 |
| Porphyric Herbicide | TATTACGTCCTCTTTCGGTTGCCGCAGCAGATGCACTTTCAAATTT | 4645 |
| Resistant | CTACTATCCCCCAATGGGAGCAGTCACAATTTCATATCCTCAAGAA | |
| PPO | GCTATTCGTGATGAGCGTCTGGTTGATGG | |
| Nicotiana tabacum | CCATCAACCAGACGCTCATCACGAATAGCTTCTTGAGGATATGAA | 4646 |
| Val376Met | ATTGTGACTGCTCCCATTGGGGGATAGTAGAAATTTGAAAGTGCA | |
| GTT-ATG | TCTGCTGCGGCAACCGAAAGAGGACGTAATA | |
| | TCCCCCAATGGGAGCAG | 4647 |
| | CTGCTCCCATTGGGGGA | 4648 |
| Porphyric Herbicide | TGTTGCGTCCGCTTTCGTTGGGTGCAGCAGATGCATTGTCAAAAT | 4649 |
| Resistant | TTTATTATCCTCCGATGGCAGCTGTATCAATTTCATATCCAAAAGA | |
| PPO | CGCAATTCGTGCTGACCGGCTGATTGATGG | |
| Cichorium intybus | CCATCAATCAGCCGGTCAGCACGAATTGCGTCTTTTGGATATGAA | 4650 |
| Val383Met | ATTGATACAGCTGCCATCGGAGGATAATAAAATTTTGACAATGCAT | |
| GTT-ATG | CTGCTGCACCCAACGAAAGCGGACGCAACA | |
| | TCCTCCGATGGCAGCTG | 4651 |
| | CAGCTGCCATCGGAGGA | 4652 |
| Porphyric Herbicide | TCCTTCGTCCACTTTCAGATGTCGCCGCAGAATCTCTTTCAAAATT | 4653 |
| Resistant | TCATTATCCACCAATGGCAGCTGTGTCACTTTCCTATCCTAAAGAA | |
| PPO | GCAATTAGATCAGAGTGCTTGATTGACGG | |
| Spinacia oleracea | CCGTCAATCAAGCACTCTGATCTAATTGCTTCTTTAGGATAGGAAA | 4654 |
| Val390Met | GTGACACAGCTGCCATTGGTGGATAATGAAATTTTGAAAGAGATT | |
| GTT-ATG | CTGCGGCGACATCTGAAAGTGGACGAAGGA | |
| | TCCACCAATGGCAGCTG | 4655 |
| | CAGCTGCCATTGGTGGA | 4656 |
| Porphyric Herbicide | TTTTGCGTCCACTTTCAAGCGATGCTGCAGATGCTCTATCAAGATT | 4657 |
| Resistant | CTATTATCCACCGATGGCTGCTGTAACTGTTTCGTATCCAAAGGAA | |
| Zea mays | CCATCAATTAAGCATTCTTTTCTAATTGCTTCCTTTGGATACGAAAC | 4658 |
| Val363Met | AGTTACAGCAGCCATCGGTGGATAATAGAATCTTGATAGAGCATC | |
| GTT-ATG | TGCAGCATCGCTTGAAAGTGGACGCAAAA | |
| | TCCACCGATGGCTGCTG | 4659 |
| | CAGCAGCCATCGGTGGA | 4660 |
| Porphyric Herbicide | TCTTGCGGCCACTTTCAAGTGATGCAGCAGATGCTCTGTCAATATT | 4661 |
| Resistant | CTATTATCCACCAATGGCTGCTGTAACTGTTTCATATCCAAAAGAA | |
| PPO | GCAATTAGAAAAGAATGCTTAATTGACGG | |
| Oryza sativa | CCGTCAATTAAGCATTCTTTTCTAATTGCTTCTTTTGGATATGAAAC | 4662 |
| Val364Met | AGTTACAGCAGCCATTGGTGGATAATAGAATATTGACAGAGCATC | |
| GTT-ATG | TGCTGCATCACTTGAAAGTGGCCGCAAGA | |
| | TCCACCAATGGCTGCTG | 4663 |
| | CAGCAGCCATTGGTGGA | 4664 |
| Porphyric Herbicide | CTGGTCAAGGAGCAGGCGCCCGCCGCCGCCGAGGCCCTGGGCT | 4665 |
| Resistant | CCTTCGACTACCCGCCGATGGGCGCCGTGACGCTGTCGTACCCG | |
| PPO | CTGAGCGCCGTGCGGGAGGAGCGCAAGGCCTCGG | |
| Chlamydomonas | CCGAGGCCTTGCGCTCCTCCCGCACGGCGCTCAGCGGGTACGAC | 4666 |
| reinhardtii | AGCGTCACGGCGCCCATCGGCGGGTAGTCGAAGGAGCCCAGGG | |
| Val389Met | CCTCGGCGGCGGCGGGCGCCTGCTCCTTGACCAG | |
| GTG-ATG | ACCCGCCGATGGGCGCC | 4667 |
| | GGCGCCCATCGGCGGGT | 4668 |

[0251] TABLE 31

Genome-Altering Oligos Conferring
Triazine Resistance

| | |
|---|---|
| Phenotype, Gene, | SEQ |

| | | |
|---|---|---|
| Plant & Targeted | | ID |
| Alteration | Altering Oligos | NO: |

| | | |
|---|---|---|
| Triazine Resistant | AAACTTACAACATTGTAGCTGCTCACGGTTATTTTGGCCGATTGAT | 4669 |
| D1 Protein | TTTCCAATATGCTACTTTCAACAATTCTCGTTCTTTACATTTCTTCTT | |
| Arabidopsis thaliana | AGCGGCTTGGCCGGTAGTAGGTATTTG | |
| Ser264Thr | CAAATACCTACTACCGGCCAAGCCGCTAAGAAGAAATGTAAAGAA | 4670 |
| AGT-ACT | CGAGAATTGTTGAAAGTAGCATATTGGAAAATCAATCGGCCAAAAT | |
| | AACCGTGAGCAGCTACAATGTTGTAAGTTT | |
| | ATATGCTACTTTCAACA | 4671 |
| | TGTTGAAAGTAGCATAT | 4672 |
| Triazine Resistant | AAACTTATAACATCGTAGCCGCTCATGGTTATTTTGGCCGATTGAT | 4673 |
| D1 Protein | CTTCCAATATGCTACTTTCAACAACTCTCGTTCGTTACACTTCTTCC | |
| Nicotiana tabacum | TAGCTGCTTGGCCTGTAGTAGGTATCTG | |
| Ser264Thr | CAGATACCTACTACAGGCCAAGCAGCTAGGAAGAAGTGTAACGAA | 4674 |
| AGT-ACT | CGAGAGTTGTTGAAAGTAGCATATTGGAAGATCAATCGGCCAAAA | |
| | TAACCATGAGCGGCTACGATGTTATAAGTTT | |
| | ATATGCTACTTTCAACA | 4675 |
| | TGTTGAAAGTAGCATAT | 4676 |
| Triazine Resistant | AAACTTATAATATCGTAGCCGCTCATGGTTATTTTGGCCGATTGAT | 4677 |
| D1 Protein | CTTCCAATATGCTACTTTTAACAACTCTCGCTCTTTACATTTCTTCT | |
| Populus deltoides | TAGCTGCTTGGCCTGTAGTAGGTATCTG | |
| Ser264Thr | CAGATACCTACTACAGGCCAAGCAGCTAAGAAGAAATGTAAAGAG | 4678 |
| AGT-ACT | CGAGAGTTGTTAAAAGTAGCATATTGGAAGATCAATCGGCCAAAA | |
| | TAACCATGAGCGGCTACGATATTATAAGTTT | |
| | ATATGCTACTTTTAACA | 4679 |
| | TGTTAAAAGTAGCATAT | 4680 |
| Triazine Resistant | AAACTTATAATATCGTAGCCGCTCATGGTTATTTTGGCCGATTGAT | 4681 |
| D1 Protein | CTTCCAATATGCTACTTTCAACAACTCTCGTTCGTTACACTTCTTCC | |
| Petunia x hybrida | TAGCTGCTTGGCCTGTAGTAGGTATCTG | |
| Ser264Thr | CAGATACCTACTACAGGCCAAGCAGCTAGGAAGAAGTGTAACGAA | 4682 |
| AGT-ACT | CGAGAGTTGTTGAAAGTAGCATATTGGAAGATCAATCGGCCAAAA | |
| | TAACCATGAGCGGCTACGATATTATAAGTTT | |
| | ATATGCTACTTTCAACA | 4683 |
| | TGTTGAAAGTAGCATAT | 4684 |
| Triazine Resistant | AAACTTATAATATCGTAGCTGCTCATGGTTATTTTGGCCGATTGAT | 4685 |
| D1 Protein | CTTCCAATATGCTACTTTCAACAATTCTCGTTCTTTACATTTCTTCC | |
| Magnolia pyramidata | TAGCTGCTTGGCCTGTAGTAGGTATCTG | |
| Ser264Thr | CAGATACCTACTACAGGCCAAGCAGCTAGGAAGAAATGTAAAGAA | 4686 |
| AGT-ACT | CGAGAATTGTTGAAAGTAGCATATTGGAAGATCAATCGGCCAAAA | |
| | TAACCATGAGCAGCTACGATATTATAAGTTT | |
| | ATATGCTACTTTCAACA | 4687 |
| | TGTTGAAAGTAGCATAT | 4688 |
| Triazine Resistant | AAACCTATAATATTGTAGCAGCTCATGGTTATTTTGGCCGATTGAT | 4689 |
| D1 Protein | CTTCCAATATGCTACTTTCAACAACTCTCGTTCTTTACATTTCTTCC | |
| Medicago sativa | TAGCTGCTTGGCCTGTAGTAGGTATCTG | |
| Ser264Thr | CAGATACCTACTACAGGCCAAGCAGCTAGGAAGAAATGTAAAGAA | 4690 |
| AGT-ACT | CGAGAGTTGTTGAAAGTAGCATATTGGAAGATCAATCGGCCAAAA | |
| | TAACCATGAGCTGCTACAATATTATAGGTTT | |
| | ATATGCTACTTTCAACA | 4691 |
| | TGTTGAAAGTAGCATAT | 4692 |
| Triazine Resistant | AAACCTATAATATTGTAGCTGCTCATGGTTATTTTGGCCGATTGAT | 4693 |
| D1 Protein | CTTCCAATATGCAACTTTCAACAATTCTCGTTCTTTACATTTCTTCT | |
| Glycine max | TAGCTGCTTGGCCTGTAGTAGGTATTTG | |
| Ser264Thr | CAAATACCTACTACAGGCCAAGCAGCTAAGAAGAAATGTAAAGAA | 4694 |
| AGT-ACT | CGAGAATTGTTGAAAGTTGCATATTGGAAGATCAATCGGCCAAAA | |
| | TAACCATGAGCAGCTACAATATTATAGGTTT | |
| | ATATGCAACTTTCAACA | 4695 |
| | TGTTGAAAGTTGCATAT | 4696 |
| Triazine Resistant | AAACTTACAACATTGTAGCTGCTCACGGTTATTTTGGCCGATTGAT | 4697 |
| D1 Protein | CTTCCAATATGCTACTTTCAACAATTCTCGTTCTTTACATTTCTTCT | |
| Brassica napus | TAGCGGCTTGGCCGGTAGTAGGTATTTG | |
| Gly264Thr | CAAATACCTACTACCGGCCAAGCCGCTAAGAAGAAATGTAAAGAA | 4698 |
| GGT-ACT | CGAGAATTGTTGAAAGTAGCATATTGGAAGATCAATCGGCCAAAA | |
| | TAACCGTGAGCAGCTACAATGTTGTAAGTTT | |
| | ATATGCTACTTTCAACA | 4699 |
| | TGTTGAAAGTAGCATAT | 4700 |
| Triazine Resistant | AAACTTATAATATTGTGGCCGCTCATGGTTATTTTGGCCGATTAAT | 4701 |
| D1 Protein | CTTCCAATATGCTACTTTTAACAACTCTCGTTCTTTACACTTCTTCT | |
| Oryza sativa | TGGCTGCTTGGCCTGTAGTAGGGATTTG | |
| Ser264Thr | CAAATCCCTACTACAGGCCAAGCAGCCAAGAAGAAGTGTAAAGAA | 4702 |
| AGT-ACT | CGAGAGTTGTTAAAAGTAGCATATTGGAAGATTAATCGGCCAAAAT | |
| | AACCATGAGCGGCCACAATATTATAAGTTT | |
| | ATATGCTACTTTTAACA | 4703 |
| | TGTTAAAAGTAGCATAT | 4704 |
| Triazine Resistant | AGACTTATAATATTGTGGCTGCTCACGGTTATTTTGGTCGATTAAT | 4705 |
| D1 Protein | CTTCCAATATGCTACTTTCAACAATTCTCGTTCTTTACACTTCTTCT | |
| Zea mays | TGGCTGCTTGGCCTGTAGTAGGGATCTG | |
| Ser264Thr | CAGATCCCTACTACAGGCCAAGCAGCCAAGAAGAAGTGTAAAGAA | 4706 |
| AGT-ACT | CGAGAATTGTTGAAAGTAGCATATTGGAAGATTAATCGACCAAAAT | |
| | AACCGTGAGCAGCCACAATATTATAAGTCT | |
| | ATATGCTACTTTCAACA | 4707 |
| | TGTTGAAAGTAGCATAT | 4708 |
| Triazine Resistant | AAACTTACAACATTGTAGCTGCTCACGGTTATTTTGGCCGATTGAT | 4709 |
| D1 Protein | TTTCCAATATGCTACTTTCAACAATTCTCGTTCTTTACATTTCTTCTT | |
| Arabidopsis thaliana | AGCGGCTTGGCCGGTAGTAGGTATTTG | |
| Ser264Thr | CAAATACCTACTACCGGCCAAGCCGCTAAGAAGAAATGTAAAGAA | 4710 |
| AGT-ACT | CGAGAATTGTTGAAAGTAGCATATTGGAAAATCAATCGGCCAAAAT | |
| | AACCGTGAGCAGCTACAATGTTGTAAGTTT | |
| | ATATGCTACTTTCAACA | 4711 |
| | TGTTGAAAGTAGCATAT | 4712 |
| Triazine Resistant | AAACTTATAACATCGTAGCCGCTCATGGTTATTTTGGCCGATTGAT | 4713 |
| D1 Protein | CTTCCAATATGCTACTTTCAACAACTCTCGTTCGTTACACTTCTTCC | |
| Nicotiana tabacum | TAGCTGCTTGGCCTGTAGTAGGTATCTG | |
| Ser264Thr | CAGATACCTACTACAGGCCAAGCAGCTAGGAAGAAGTGTAACGAA | 4714 |
| AGT-ACT | CGAGAGTTGTTGAAAGTAGCATATTGGAAGATCAATCGGCCAAAA | |
| | TAACCATGAGCGGCTACGATGTTATAAGTTT | |
| | ATATGCTACTTTCAACA | 4715 |
| | TGTTGAAAGTAGCATAT | 4716 |
| Triazine Resistant | AAACTTATAATATCGTAGCCGCTCATGGTTATTTTGGCCGATTGAT | 4717 |
| D1 Protein | CTTCCAATATGCTACTTTTAACAACTCTCGCTCTTTACATTTCTTCT | |
| Populus deltoides | TAGCTGCTTGGCCTGTAGTAGGTATCTG | |
| Ser264Thr | CAGATACCTACTACAGGCCAAGCAGCTAAGAAGAAATGTAAAGAG | 4718 |
| AGT-ACT | CGAGAGTTGTTAAAAGTAGCATATTGGAAGATCAATCGGCCAAAA | |
| | TAACCATGAGCGGCTACGATATTATAAGTTT | |
| | ATATGCTACTTTTAACA | 4719 |
| | TGTTAAAAGTAGCATAT | 4720 |
| Triazine Resistant | AAACTTATAATATCGTAGCCGCTCATGGTTATTTTGGCCGATTGAT | 4721 |
| D1 Protein | CTTCCAATATGCTACTTTCAACAACTCTCGTTCGTTACACTTGTTCC | |
| Petunia x hybrida | TAGCTGCTTGGCCTGTAGTAGGTATCTG | |
| Ser264Thr | CAGATACCTACTACAGGCCAAGCAGCTAGGAAGAAGTGTAACGAA | 4722 |
| AGT-ACT | CGAGAGTTGTTGAAAGTAGCATATTGGAAGATCAATCGGCCAAAA | |
| | TAACCATGAGCGGCTACGATATTATAAGTTT | |
| | ATATGCTACTTTCAACA | 4723 |
| | TGTTGAAAGTAGCATAT | 4724 |
| Triazine Resistant | AAACTTATAATATCGTAGCTGCTCATGGTTATTTTGGCCGATTGAT | 4725 |
| D1 Protein | CTTCCAATATGCTACTTTCAACAATTCTCGTTCTTTACATTTCTTCC | |
| Magnolia pyramidata | TAGCTGCTTGGCCTGTAGTAGGTATCTG | |
| Ser264Thr | CAGATACCTACTACAGGCCAAGCAGCTAGGAAGAAATGTATAAGAA | 4726 |
| AGT-ACT | CGAGAATTGTTGAAAGTAGCATATTGGAAGATCAATCGGCCAAAA | |
| | TAACCATGAGCAGCTACGATATTATAAGTTT | |
| | ATATGCTACTTTCAACA | 4727 |
| | TGTTGAAAGTAGCATAT | 4728 |
| Triazine Resistant | AAACCTATAATATTGTAGCAGCTCATGGTTATTTTGGCCGATTGAT | 4729 |
| D1 Protein | CTTCCAATATGCTACTTTCAACAACTCTCGTTCTTTACATTTCTTCC | |
| Medicago sativa | TAGCTGCTTGGCCTGTAGTAGGTATCTG | |
| Ser264Thr | CAGATACCTACTACAGGCCAAGCAGCTAGGAAGAAATGTAAAGAA | 4730 |
| AGT-ACT | CGAGAGTTGTTGAAAGTAGCATATTGGAAGATCAATCGGCCAAAA | |
| | TAACCATGAGCTGCTACAATATTATAGGTTT | |
| | ATATGCTACTTTCAACA | 4731 |
| | TGTTGAAAGTAGCATAT | 4732 |
| Triazine Resistant | AAACCTATAATATTGTAGCTGCTCATGGTTATTTTGGCCGATTGAT | 4733 |
| D1 Protein | CTTCCAATATGCAACTTTCAACAATTCTCGTTCTTTACATTTCTTCT | |
| Glycine max | TAGCTGCTTGGCCTGTAGTAGGTATTTG | |
| Ser264Thr | CAAATACCTACTACAGGCCAAGCAGCTAAGAAGAAATGTAAAGAA | 4734 |
| AGT-ACT | CGAGAATTGTTGAAAGTTGCATATTGGAAGATCAATCGGCCAAAA | |
| | TAACCATGAGCAGCTACAATATTATAGGTTT | |
| | ATATGCAACTTTCAACA | 4735 |
| | TGTTGAAAGTTGCATAT | 4736 |
| Triazine Resistant | AAACTTACAACATTGTAGCTGCTCACGGTTATTTTGGCCGATTGAT | 4737 |
| D1 Protein | CTTCCAATATGCTACTTTCAACAATTCTCGTTCTTTACATTTCTTCT | |
| Brassica napus | TAGCGGCTTGGCCGGTAGTAGGTATTTG | |
| Gly264Thr | CAAATACCTACTACCGGCCAAGCCGCTAAGAAGAAATGTAAAGAA | 4738 |
| GGT-ACT | CGAGAATTGTTGAAAGTAGCATATTGGAAGATCAATCGGCCAAAA | |
| | TAACCGTGAGCAGCTACAATGTTGTAAGTTT | |
| | ATATGCTACTTTCAACA | 4739 |
| | TGTTGAAAGTAGCATAT | 4740 |
| Triazine Resistant | AAACTTATAATATTGTGGCCGCTCATGGTTATTTTGGCCGATTAAT | 4741 |
| D1 Protein | CTTCCAATATGCTACTTTTAACAACTCTCGTTCTTTACACTTCTTCT | |
| Oryza sativa | TGGCTGCTTGGCCTGTAGTAGGGATTTG | |
| Ser264Thr | CAAATCCCTACTACAGGCCAAGCAGCCAAGAAGAAGTGTAAAGAA | 4742 |
| AGT-ACT | CGAGAGTTGTTAAAAGTAGCATATTGGAAGATTAATCGGCCAAAAT | |
| | AACCATGAGCGGCCACAATATTATAAGTTT | |
| | ATATGCTACTTTTAACA | 4743 |
| | TGTTAAAAGTAGCATAT | 4744 |
| Triazine Resistant | AGACTTATAATATTGTGGCTGCTCACGGTTATTTTGGTCGATTAAT | 4745 |
| D1 Protein | CTTCCAATATGCTACTTTCAACAATTCTCGTTCTTTACACTTCTTCT | |
| Zea mays | TGGCTGCTTGGCCTGTAGTAGGGATCTG | |
| Ser264Thr | CAGATCCCTACTACAGGCCAAGCAGCCAAGAAGAAGTGTAAAGAA | 4746 |
| AGT-ACT | CGAGAATTGTTGAAAGTAGCATATTGGAAGATTAATCGACCAAAAT | |
| | AACCGTGAGCAGCCACAATATTATAAGTCT | |
| | ATATGCTACTTTCAACA | 4747 |
| | TGTTGAAAGTAGCATAT | 4748 |
| Triazine Resistant | AAACTTACAACATTGTAGCTGCTCACGGTTATTTTGGCCGATTGAT | 4749 |
| D1 Protein | TTTCCAATATGCTACTTTCAACAATTCTCGTTCTTTACATTTCTTCTT | |
| Arabidopsis thaliana | AGCGGCTTGGCCGGTAGTAGGTATTTG | |
| Ser264Thr | CAAATACCTACTACCGGCCAAGCCGCTAAGAAGAAATGTAAAGAA | 4750 |
| AGT-ACT | CGAGAATTGTTGAAAGTAGCATATTGGAAAATCAATCGGCCAAAAT | |
| | AACCGTGAGCAGCTACAATGTTGTAAGTTT | |
| | ATATGCTACTTTCAACA | 4751 |
| | TGTTGAAAGTAGCATAT | 4752 |
| Triazine Resistant | AAACCTACAATATTGTGGCTGCTCACGGTTATTTCGGCCGATTGAT | 4753 |
| D1 Protein | CTTCCAGTATGCTACTTTCAACAACTCCCGTTCTTTACATTTCTTCT | |
| Picea abies | TAGCTGCTTGGCCCGTAGCAGGTATCTG | |
| Ser264Thr | CAGATACCTGCTACGGGCCAAGCAGCTAAGAAGAAATGTAAAGAA | 4754 |
| AGT-ACT | CGGGAGTTGTTGAAAGTAGCATACTGGAAGATCAATCGGCCGAAA | |
| | TAACCGTGAGCAGCCACAATATTGTAGGTTT | |
| | GTATGCTACTTTCAACA | 4755 |
| | TGTTGAAAGTAGCATAC | 4756 |
| Triazine Resistant | AAACCTATAATATTGTAGCTGCTCACGGTTATTTTGGCCGATTGAT | 4757 |
| D1 Protein | CTTCCAATATGCTACTTTCAACAATTCTCGCTCTTTACATTTCTTCC | |
| Vicia faba | TAGCTGCTTGGCCTGTAGTAGGTATCTG | |
| Ser264Thr | CAGATACCTACTACAGGCCAAGCAGCTAGGAAGAAATGTAAAGAG | 4758 |
| AGT-ACT | CGAGAATTGTTGAAAGTAGCATATTGGAAGATCAATCGGCCAAAA | |
| | TAACCGTGAGCAGCTACAATATTATAGGTTT | |
| | ATATGCTACTTTCAACA | 4759 |
| | TGTTGAAAGTAGCATAT | 4760 |
| Triazine Resistant | AGACTTATAATATTGTGGCTGCTCATGGTTATTTTGGCCGATTAAT | 4761 |
| D1 Protein | CTTCCAATATGCTACTTTCAACAACTCTCGTTCTTTACACTTCTTCT | |
| Hordeum vulgare | TGGCTGCTTGGCCTGTAGTAGGAATCTG | |
| Ser264Thr | CAGATTCCTACTACAGGCCAAGCAGCCAAGAAGAAGTGTAAAGAA | 4762 |
| AGT-ACT | CGAGAGTTGTTGAAAGTAGCATATTGGAAGATTAATCGGCCAAAA | |
| | TAACCATGAGCAGCCACAATATTATAAGTCT | |
| | ATATGCTACTTTCAACA | 4763 |
| | TGTTGAAAGTAGCATAT | 4764 |
| Triazine Resistant | AAACTTATAATATTGTGGCTGCTCATGGTTATTTTGGCCGATTAAT | 4765 |
| D1 Protein | CTTCCAATATGCTACTTTCAACAACTCTCGTTCTTTACACTTCTTCT | |
| Triticum aestivum | TGGCTGCTTGGCCTGTAGTAGGAATCTG | |
| Ser264Thr | CAGATTCCTACTACAGGCCAAGCAGCCAAGAAGAAGTGTAAAGAA | 4766 |
| AGT-ACT | CGAGAGTTGTTGAAAGTAGCATATTGGAAGATTAATCGGCCAAAA | |
| | TAACCATGAGCAGCCACAATATTATAAGTTT | |
| | ATATGCTACTTTCAACA | 4767 |
| | TGTTGAAAGTAGCATAT | 4768 |
| Triazine Resistant | AAACTTATAATATTGTAGCTGCTCATGGTTATTTTGGCCGATTAATC | 4769 |
| D1 Protein | TTCCAATATGCAACTTTCAACAATTCTCGTTCTTTACATTTCTTCCT | |
| Vigna unguiculata | AGCTGCTTGGCCTGTAGTAGGTATTTG | |
| Ser264Thr | CAAATACCTACTACAGGCCAAGCAGCTAGGAAGAAATGTAAAGAA | 4770 |
| AGT-ACT | CGAGAATTGTTGAAAGTTGCATATTGGAAGATTAATCGGCCAAAAT | |
| | AACCATGAGCAGCTACAATATTATAAGTTT | |
| | ATATGCAACTTTCAACA | 4771 |
| | TGTTGAAAGTTGCATAT | 4772 |
| Triazine Resistant | AAACCTATAATATTGTAGCTGCTCACGGTTATTTTGGCCGATTGAT | 4773 |
| D1 Protein | CTTCCAATATGCAACTTTCAACAACTCTCGTTCTTTACACTTCTTCT | |
| Lotus japonicus | TAGCTGCTTGGCCTGTTGTAGGTATCTG | |
| Ser264Thr | CAGATACCTACAACAGGCCAAGCAGCTAAGAAGAAGTGTAAAGAA | 4774 |
| AGT-ACT | CGAGAGTTGTTGAAAGTTGCATATTGGAAGATCAATCGGCCAAAA | |
| | TAACCGTGAGCAGCTACAATATTATAGGTTT | |
| | ATATGCAACTTTCAACA | 4775 |
| | TGTTGAAAGTTGCATAT | 4776 |
| Triazine Resistant | AAACTTACAACATTGTAGCTGCTCACGGTTATTTTGGCCGATTGAT | 4777 |
| D1 Protein | CTTCCAATATGCTACTTTCAACAATTCTCGTTCTTTACATTTCTTCT | |
| Sinapis alba | TAGCGGCTTGGCCGGTAGTAGGTATTTG | |
| Ser264Thr | CAAATACCTACTACCGGCCAAGCCGCTAAGAAGAAATGTAAAGAA | 4778 |
| AGT-ACT | CGAGAATTGTTGAAAGTAGCATATTGGAAGATCAATCGGCCAAAA | |
| | TAACCGTGAGCAGCTACAATGTTGTAAGTTT | |
| | ATATGCTACTTTCAACA | 4779 |
| | TGTTGAAAGTAGCATAT | 4780 |
| Triazine Resistant | AAACCTATAATATTGTAGCTGCTCACGGTTATTTTGGCCGATTGAT | 4781 |
| D1 Protein | CTTCCAATATGCTACTTTCAACAATTCTCGCTCTTTACATTTCTTCC | |
| Pisum sativum | TAGCTGCTTGGCCTGTAGTAGGTATCTG | |
| Ser264Thr | CAGATACCTACTACAGGCCAAGCAGCTAGGAAGAAATGTAAAGAG | 4782 |
| AGT-ACT | CGAGAATTGTTGAAAGTAGCATATTGGAAGATCAATCGGCCAAAA | |
| | TAACCGTGAGCAGCTACAATATTATAGGTTT | |
| | ATATGCTACTTTCAACA | 4783 |
| | TGTTGAAAGTAGCATAT | 4784 |
| Triazine Resistant | AAACTTATAATATCGTAGCTGCTCATGGTTATTTTGGTCGATTGAT | 4785 |
| D1 Protein | CTTCCAATATGCTACTTTCAACAACTCTCGTTCTTTACACTTCTTCT | |
| Spinacia oleracea | TAGCTGCTTGGCCTGTAGTAGGTATTTG | |
| Ser264Thr | CAAATACCTACTACAGGCCAAGCAGCTAAGAAGAAGTGTAAAGAA | 4786 |
| AGT-ACT | CGAGAGTTGTTGAAAGTAGCATATTGGAAGATCAATCGACCAAAA | |
| | TAACCATGAGCAGCTACGATATTATAAGTTT | |
| | ATATGCTACTTTCAACA | 4787 |
| | TGTTGAAAGTAGCATAT | 4788 |
| Triazine Resistant | AAACTTATAACATCGTAGCCGCTCATGGTTATTTTGGCCGATTGAT | 4789 |
| D1 Protein | CTTCCAATATGCTACTTTCAACAACTCTCGTTCGTTACACTTCTTCC | |
| Nicotiana debneyi | TAGCTGCTTGGCCTGTAGTAGGTATCTG | |
| Ser264Thr | CAGATACCTACTACAGGCCAAGCAGCTAGGAAGAAGTGTAACGAA | 4790 |
| AGT-ACT | CGAGAGTTGTTGAAAGTAGCATATTGGAAGATCAATCGGCCAAAA | |
| | TAACCATGAGCGGCTACGATGTTATAAGTTT | |
| | ATATGCTACTTTCAACA | 4791 |
| | TGTTGAAAGTAGCATAT | 4792 |
| Triazine Resistant | AAACTTATAATATCGTAGCCGCTCATGGTTATTTTGGCCGATTGAT | 4793 |
| D1 Protein | CTTCCAATATGCTACTTTCAACAACTCTCGTTCGTTACACTTCTTCC | |
| Solanum nigrum | TAGCTGCTTGGCCTGTAGTAGGTATCTG | |
| Ser264Thr | CAGATACCTACTACAGGCCAAGCAGCTAGGAAGAAGTGTAACGAA | 4794 |
| AGT-ACT | CGAGAGTTGTTGAAAGTAGCATATTGGAAGATCAATCGGCCAAAA | |
| | TAACCATGAGCGGCTACGATATTATAAGTTT | |
| | ATATGCTACTTTCAACA | 4795 |
| | TGTTGAAAGTAGCATAT | 4796 |
| Triazine Resistant | AAACTTATAACATCGTAGCCGCTCATGGTTATTTTGGCCGATTGAT | 4797 |
| D1 Protein | CTTCCAATATGCTACTTTCAACAACTCTCGTTCGTTACACTTCTTCC | |
| Nicotiana | TAGCTGCTTGGCCTGTAGTAGGTATCTG | |
| plumbaginifolia | CAGATACCTACTACAGGCCAAGCAGCTAGGAAGAAGTGTAACGAA | 4798 |
| Ser264Thr | CGAGAGTTGTTGAAAGTAGCATATTGGAAGATCAATCGGCCAAAA | |
| AGT-ACT | TAACCATGAGCGGCTACGATGTTATAAGTTT | |
| | ATATGCTACTTTCAACA | 4799 |
| | TGTTGAAAGTAGCATAT | 4800 |

### EXAMPLE 27

### Engineering Male- or Female-Sterile Plants

[0252] Flower development in distantly related dicot plant species is increasingly better understood and appears to be regulated by a family of genes which encode regulatory proteins. These genes include, for example, AGAMOUS (AG), APETALA1 (AP1), and APETALA3 (AP3) and PISTILLATA (PI) in Arabidopsis thaliana, and DEFICIENS A (DEFA), GLOBOSA (GLO), SQUAMOSA (SQUA), and PLENA (PLE) in Antirrhinum majus. Genetic studies have shown that the DEFA, GLO and AP3 genes are essential for petal and stamen development. Sequence analysis of these genes revealed that the gene products contain a conserved MADS box region, a DNA-binding domain. Using these clones as probes, MADS box genes have also been isolated from other species including tomato, tobacco, petunia, Brassica napus, and maize.

[0253] Altering the expression of these genes results in altered floral morphology. For example, mutations in AP3 and PI result in male-sterile flowers because petals develop in place of stamens.

[0254] The attached tables disclose exemplary oligonucleotide base sequences which can be used to generate site-specific mutations that confer altered floral structures in plants.

TABLE 32

Oligonucleotides to produce male-sterile plants

| | |
|---|---|
| Phenotype, Gene, | SEQ |

| | | |
|---|---|---|
| Plant & Targeted | | ID |
| Alteration | Altering Oligos | NO: |

| | | |
|---|---|---|
| Male-sterile | TTGTCCTCTCCACCAAATCTCTTCAACAAAAAGATTAAACAAAGAG | 4801 |
| AP3 | AGAAGAATATGGCGTGAGGGAAGATCCAGATCAAGAGGATAGAGA | |
| Arabidopsis thaliana | ACCAGACAAACAGACAAGTGACGTATTCAA | |
| Arg3Term | TTGAATACGTCACTTGTCTGTTTGTCTGGTTCTCTATCCTCTTGATC | 4802 |
| AGA-TGA | TGGATCTTCCCTCACGCCATATTCTTCTCTCTTTGTTTAATCTTTTT | |
| | GTTGAAGAGATTTGGTGGAGAGGACAA | |
| | ATATGGCGTGAGGGAAG | 4803 |
| | CTTCCCTCACGCCATAT | 4804 |
| Male-sterile | TCTCCACCAAATCTCTTCAACAAAAAGATTAAACAAAGAGAGAAGA | 4805 |
| AP3 | ATATGGCGAGAGGGTAGATCCAGATCAAGAGGATAGAGAACCAGA | |
| Arabidopsis thaliana | CAAACAGACAAGTGACGTATTCAAAGAGAA | |
| Lys5Term | TTCTCTTTGAATACGTCACTTGTCTGTTTGTCTGGTTCTCTATCCTC | 4806 |
| AAG-TAG | TTGATCTGGATCTACCCTCTCGCCATATTCTTCTCTCTTTGTTTAAT | |
| | CTTTTTGTTGAAGAGATTTGGTGGAGA | |
| | CGAGAGGGTAGATCCAG | 4807 |
| | CTGGATCTACCCTCTCG | 4808 |
| Male-sterile | CCAAATCTCTTCAACAAAAAGATTAAACAAAGAGAGAAGAATATGG | 4809 |
| AP3 | CGAGAGGGAAGATCTAGATCAAGAGGATAGAGAACCAGACAAACA | |
| Arabidopsis thaliana | GACAAGTGACGTATTCAAAGAGAAGGAATG | |
| Gln7Term | CATTCCTTCTCTTTGAATACGTCACTTGTCTGTTTGTCTGGTTCTCT | 4810 |
| GAG-TAG | ATCCTCTTGATCTAGATCTTCCCTCTCGCCATATTCTTCTCTCTTTG | |
| | TTTAATCTTTTTGTTGAAGAGATTTGG | |
| | GGAAGATCTAGATCAAG | 4811 |
| | CTTGATCTAGATCTTCC | 4812 |
| Male-sterile | CTCTTCAACAAAAAGATTAAACAAAGAGAGAAGAATATGGCGAGAG | 4813 |
| AP3 | GGAAGATCCAGATCTAGAGGATAGAGAACCAGACAAACAGACAAG | |
| Arabidopsis thaliana | TGACGTATTCAAAGAGAAGGAATGGTTTAT | |
| Lys9Term | ATAAACCATTCCTTCTCTTTGAATACGTCACTTGTCTGTTTGTCTGG | 4814 |
| AAG-TAG | TTCTCTATCCTCTAGATCTGGATCTTCCCTCTCGCCATATTCTTCTC | |
| | TCTTTGTTTAATCTTTTTGTTGAAGAG | |
| | TCCAGATCTAGAGGATA | 4815 |
| | TATCCTCTAATCTGGA | 4816 |
| Male-sterile | AGAGGGAAGATCCAGATCAAGAGGATAGAGAACCAGACCAACCG | 4817 |
| AP3 | ACAAGTGACGTATTCTTAGAGAAGAAATGGTTTGTTCAAGAAAGCT | |
| Brassica oleracea | CACGAGCTTACAGTTTTATGTGATGCTAGGG | |
| Lys23Term | CCCTAGCATCACATAAAACTGTAAGCTCGTGAGCTTTCTTGAACAA | 4818 |
| AAG-TAG | ACCATTTCTTCTCTAAGAATACGTCACTTGTCGGTTGGTCTGGTTC | |
| | TCTATCCTCTTGATCTGGATCTTCCCTCT | |
| | CGTATTCTTAGAGAAGA | 4819 |
| | TCTTCTCTAAGAATACG | 4820 |
| Male-sterile | GGGAAGATCCAGATCAAGAGGATAGAGAACCAGACCAACCGACAA | 4821 |
| AP3 | GTGACGTATTCTAAGTGAAGAAATGGTTTGTTCAAGAAAGCTCACG | |
| Brassica oleracea | AGCTTACAGTTTTATGTGATGCTAGGGTTT | |
| Arg24Term | AAACCCTAGCATCACATAAAACTGTAAGCTCGTGAGCTTTCTTGAA | 4822 |
| AGA-TGA | CAAACCATTTCTTCACTTAGAATACGTCACTTGTCGGTTGGTCTGG | |
| | TTCTCTATCCTCTTGATCTGGATCTTCCC | |
| | ATTCTAAGTGAAGAAAT | 4823 |
| | ATTTCTTCACTTAGAAT | 4824 |
| Male-sterile | AAGATCCAGATCAAGAGGATAGAGAACCAGACCAACCGAGAAGTG | 4825 |
| AP3 | ACGTATTCTAAGAGATGAAATGGTTTGTTCAAGAAAGCTCACGAGC | |
| Brassica oleracea | TTACAGTTTTATGTGATGCTAGGGTTTCGA | |
| Arg25Term | TCGAAACCCTAGCATCACATAAAACTGTAAGCTCGTGAGCTTTCTT | 4826 |
| AGA-TGA | GAACAAACCATTTCACTCTTAGAATACGTCACTTGTCGGTTGGTC | |
| | TGGTTCTCTATCCTCTTGATCTGGATCTT | |
| | CTAAGAGATGAAATGGT | 4827 |
| | ACCATTTCATCTCTTAG | 4828 |
| Male-sterile | TCAAGAGGATAGAGAACCAGACCAACCGACAAGTGACGTATTCTA | 4829 |
| AP3 | AGAGAAGAAATGGTTAGTTCAAGAAAGCTCACGAGCTTACAGTTTT | |
| Brassica oleracea | ATGTGATGCTAGGGTTTCGATTATCATGTT | |
| Leu28Term | AACATGATAATCGAAACCCTAGCATCACATAAAACTGTTAAGCTCGT | 4830 |
| TTG-TAG | GAGCTTTCTTGAACTAACCATTTCTTCTCTTAGAATACGTCACTTGT | |
| | CGGTTGGTCTGGTTCTCTATCCTCTTGA | |
| | AAATGGTTAGTTCAAGA | 4831 |
| | TCTTGAACTAACCATTT | 4832 |
| Male-sterile | GGCTCGAGGGAAGATCCAGATTAAGAGGATAGAGAACCAAACAAA | 4833 |
| AP3 | CAGGCAGGTCACCTAGTCCAAGAGAAGAAATGGTTTGTTCAAGAA | |
| Brassica napus | AGCACACGAGCTCTCTGTTCTCTGTGATGCT | |
| Tyr21Term | AGCATCACAGAGAACAGAGAGCTCGTGTGCTTTCTTGAACAAACC | 4834 |
| TAC-TAG | ATTTCTTCTCTTGGACTAGGTGACCTGCCTGTTTGTTTGGTTCTCTA | |
| | TCCTCTTAATCTGGATCTTCCCTCGAGCC | |
| | GTCACCTAGTCCAAGAG | 4835 |
| | CTCTTGGACTAGGTGAC | 4836 |
| Male-sterile | CGAGGGAAGATCCAGATTAAGAGGATAGAGAACCAAACAAACAGG | 4837 |
| AP3 | CAGGTCACCTACTCCTAGAGAAGAAATGGTTTGTTCAAGAAAGCAC | |
| Brassica napus | ACGAGCTCTCTGTTCTCTGTGATGCTAAAG | |
| Lys23Term | CTTTAGCATCACAGAGAACAGAGAGCTCGTGTGCTTTCTTGAACAA | 4838 |
| AAG-TAG | ACCATTTCTTCTCTAGGAGTAGGTGACCTGCCTGTTTGTTTGGTTC | |
| | TCTATCCTCTTAATCTGGATCTTCCCTCG | |
| | CCTACTCCTAGAGAAGA | 4839 |
| | TCTTCTCTAGGAGTAGG | 4840 |
| Male-sterile | GGGAAGATCCAGATTAAGAGGATAGAGAACCAAACAAACAGGCAG | 4841 |
| AP3 | GTCACCTACTCCAAGTGAAGAAATGGTTTGTTCAAGAAAGCACACG | |
| Brassica napus | AGCTCTCTGTTCTCTGTGATGCTAAAGTTT | |
| Arg24Term | AAACTTTAGCATCACAGAGAACAGAGAGCTCGTGTGCTTTCTTGAA | 4842 |
| AGA-TGA | CAAACCATTTCTTCACTTGGAGTAGGTGACCTGCCTGTTTGTTTGG | |
| | TTCTCTATCCTCTTAATCTGGATCTTCCC | |
| | ACTCCAAGTGAAGAAAT | 4843 |
| | ATTTCTTCACTTGGAGT | 4844 |
| Male-sterile | AAGATCCAGATTAAGAGGATAGAGAACCAAACAAACAGGCAGGTC | 4845 |
| AP3 | ACCTACTCCAAGAGATGAAATGGTTTGTTCAAGAAAGCACACGAG | |
| Brassica napus | CTCTCTGTTCTCTGTGATGCTAA4GTTTCCA | |
| Arg25Term | TGGAAACTTTAGCATCACAGAGAACAGAGAGCTCGTGTGCTTTCTT | 4846 |
| AGA-TGA | GAACAAACCATTTCATCTCTTGGAGTAGGTGACCTGCCTGTTTGTT | |
| | TGGTTCTCTATCCTCTTAATCTGGATCTT | |
| | CCAAGAGATGAAATGGT | 4847 |
| | ACCATTTCATCTCTTGG | 4848 |
| Male-sterile | GGAGAGAAAGGAAAGCTGGAAGAAGAAAACAAGAGCAGTAGTGG | 4849 |
| DEFA | TAGTGGTTCGATGGCTTGAGGGAAGATCCAGATTAAGAGGATAGA | |
| Antirrhinum majus | GAACCAAACAAACAGGCAGGTCACCTACTCCA | |
| Arg3Term | TGGAGTAGGTGACCTGCCTGTTTGTTTGGTTCTCTATCCTCTTAAT | 4850 |
| CGA-TGA | CTGGATCTTCCCTCAAGCCATCGAACCACTACCACTACTGCTCTTG | |
| | TTTTCTTCTTCCAGCTTTCCTTTCTCTCC | |
| | CGATGGCTTGAGGGAAG | 4851 |
| | CTTCCCTCAAGCCATCG | 4852 |
| Male-sterile | AAAGGAAAGCTGGAAGAAGAAAACAAGAGCAGTAGTGGTAGTGGT | 4853 |
| DEFA | TCGATGGCTCGAGGGTAGATCCAGATTAAGAGGATAGAGAACCAA | |
| Antirrhinum majus | ACAAACAGGCAGGTCACCTACTCCAAGAGAA | |
| Lys5Term | TTCTCTTGGAGTAGGTGACCTGCCTGTTTGTTTGGTTCTCTATCCT | 4854 |
| AAG-TAG | CTTAATCTGGATCTACCCTCGAGCCATCGAACCACTACCACTACTG | |
| | CTCTTGTTTTCTTCTTCCAGCTTTCCTTT | |
| | CTCGAGGGTAGATCCAG | 4855 |
| | CTGGATCTACCCTCGAG | 4856 |
| Male-sterile | AAGCTGGAAGAAGAAAACAAGAGCAGTAGTGGTAGTGGTTCGATG | 4857 |
| DEFA | GCTCGAGGGAAGATCTAGATTAAGAGGATAGAGAACCAAACAAAC | |
| Antirrhinum majus | AGGCAGGTCACCTACTCCAAGAGAAGAAATG | |
| Gln7Term | CATTTCTTCTCTTGGAGTAGGTGACCTGCCTGTTTGTTTGGTTCTC | 4858 |
| CAG-TAG | TATCCTCTTAATCTAGATCTTCCCTCGAGCCATCGAACCACTACCA | |
| | CTACTGCTCTTGTTTTCTTCTTCCAGCTT | |
| | GGAAGATCTAGATTAAG | 4859 |
| | CTTAATCTAGATCTTCC | 4860 |
| Male-sterile | GAAGAAGAAAACAAGAGCAGTAGTGGTAGTGGTTCGATGGCTCGA | 4861 |
| DEFA | GGGAAGATCCAGATTTAGAGGATAGAGAACCAAACAAACAGGCAG | |
| Antirrhinum majus | GTCACCTACTCCAAGAGAAGAAATGGTTTGT | |
| Lys9Term | ACAAACCATTTCTTCTCTTGGAGTAGGTGACCTGCCTGTTTGTTTG | 4862 |
| AAG-TAG | GTTCTCTATCCTCTAAATCTGGATCTTCCCTCGAGCCATCGAACCA | |
| | CTACCACTACTGCTCTTGTTTTCTTCTTC | |
| | TCCAGATTTAGAGGATA | 4863 |
| | TATCCTCTAAATCTGGA | 4864 |
| Male-sterile | TCAGTAATTCTTAAGATCTCAAACTTTGAGCAAAAAGAAAAAAAAAC | 4865 |
| AP3 | TATGGCTCGTGGGTAGATCCAGATCAAGAGAATAGAGAACCAAAC | |
| Nicotiana tabacum | AAACAGACAAGTCACTTATTCTAAGAGAA | |
| Lys5Term | TTCTCTTAGAATAAGTGACTTGTCTGTTTGTTTGGTTCTCTATTCTC | 4866 |
| AAG-TAG | TTGATCTGGATCTACCCACGAGCCATAGTTTTTTTTTCTTTTTGCTC | |
| | AAAGTTTGAGATCTTAAGAATTACTGA | |
| | CTCGTGGGTAGATCCAG | 4867 |
| | CTGGATCTACCCACGAG | 4868 |
| Male-sterile | ATTCTTAAGATCTCAAACTTTGAGCAAAAAGAAAAAAAAACTATGGC | 4869 |
| AP3 | TCGTGGGAAGATCTAGATCAAGAGAATAGAGAACCAAACAAACAG | |
| Nicotiana tabacum | AGAAGTCACTTATTGTAAGAGAAGAAATG | |
| Gln7Term | GATTTCTTGTCTTAGAATAAGTGAGTTGTGTGTTTGTTTGGTTGTGT | 4870 |
| CAG-TAG | ATTCTCTTGATCTAGATCTTCGGAGGAGGGATAGTTTTTTTTTGTTT | |
| | TTGGTCAAAGTTTGAGATGTTAAGAAT | |
| | GGAAGATCTAGATCAAG | 4871 |
| | CTTGATCTAGATCTTCC | 4872 |
| Male-sterile | AAGATGTGAAAGTTTGAGGAAAAAGAAAAAAAAAGTATGGCTGGTG | 4873 |
| AP3 | GGAAGATCGAGATCTAGAGAATAGAGAACGAAAGAAAGAGAGAAG | |
| Nicotiana tabacum | TGAGTTATTGTAAGAGAAGAAATGGAGTTT | |
| Lys9Term | AAAGTGGATTTGTTGTGTTAGAATAAGTGAGTTGTGTGTTTGTTTGG | 4874 |
| AAG-TAG | TTGTGTATTGTCTAGATGTGGATGTTGGCAGGAGGGATAGTTTTTTT | |
| | TTGTTTTTGGTGAAAGTTTGAGATGTT | |
| | TCCAGATCTAGAGAATA | 4875 |
| | TATTCTCTAGATCTGGA | 4876 |
| Male-sterile | ATCTCAAAGTTTGAGCAAAAAGAAAAAAAAAGTATGGGTCGTGGGA | 4877 |
| AP3 | AGATGGAGATGAAGTGAATAGAGAAGGAAAGAAAGAGAGAAGTGA | |
| Nicotiana tabacum | CTTATTCTAAGAGAAGAAATGGAGTTTTGA | |
| Arg10Term | TGAAAAGTGCATTTCTTGTGTTAGAATAAGTGACTTGTGTGTTTGTT | 4878 |
| AGA-TGA | TGGTTCTCTATTCACTTGATCTGGATCTTCCACGAGCCATAGTTT | |
| | TTTTTTCTTTTTGCTGAAAGTTTGAGAT | |
| | AGATGAAGTGAATAGAG | 4879 |
| | CTCTATTCACTTGATCT | 4880 |
| Male-sterile | GGCTCGAGGAAAGATCCAGATCAAGAGAATAGAGAACACAACGAA | 4881 |
| AP3 | GAGAGAAGTAAGTTAGTCAAAACGAAGGGATGGTCTTTTCAAGAAG | |
| Medicago sativa | GCCAATGAGCTCACTGTTCTTTGTGATGCT | |
| Tyr21Term | AGGATGAGAAAGAACAGTGAGCTGATTGGGGTTCTTGAAAAGACGA | 4882 |
| TAG-TAG | TGGGTTGGTTTTGACTAAGTTAGTTGTGTGTTGGTTGTGTTGTGTAT | |
| | TGTGTTGATGTGGATGTTTGGTGGAGGG | |
| | GTAAGTTAGTGAAAAGG | 4883 |
| | GGTTTTGACTAAGTTAG | 4884 |
| Male-sterile | GTGGAGGAAAGATGGAGATGAAGAGAATAGAGAAGAGAAGGAAGA | 4885 |
| AP3 | GAGAAGTAACTTACTGAAAACGAAGGGATGGTCTTTTCAAGAAGG | |
| Medicago sativa | CCAATGAGGTCACTGTTCTTTGTGATGGTAA | |
| Ser22Term | TTAGGATGAGAAAGAAGAGTGAGGTGATTGGGGTTGTTGAAAAGAG | 4886 |
| TCA-TGA | GATGGGTTGGTTTTCAGTAAGTTAGTTGTGTGTTGGTTGTGTTGTGT | |
| | ATTGTGTTGATGTGGATGTTTCGTGGAG | |
| | AAGTTAGTGAAAACGAA | 4887 |
| | TTCGTTTTCAGTAAGTT | 4888 |
| Male-sterile | CGAGGAAAGATCCAGATCAAGAGAATAGAGAACACAACGAACAGA | 4889 |
| AP3 | CAAGTAACTTACTCATAACGAAGGGATGGTCTTTTCAAGAAGGCCA | |
| Medicago sativa | ATGAGCTCACTGTTCTTTGTGATGCTAAGG | |
| Lys23Term | CCTTAGCATCACAAAGAACAGTGAGCTCATTGGCCTTCTTGAAAAG | 4890 |
| AAA-TAA | ACCATCCCTTCGTTATGAGTAAGTTACTTGTCTGTTCGTTGTGTTCT | |
| | CTATTCTCTTGATCTGGATCTTTCCTCG | |
| | CTTACTCATAACGAAGG | 4891 |
| | CCTTCGTTATGAGTAAG | 4892 |
| Male-sterile | GGAAAGATCCAGATCAAGAGAATAGAGAACACAACGAACAGACAA | 4893 |
| AP3 | GTAACTTACTCAAAATGAAGGGATGGTCTTTTCAAGAAGGCCAATG | |
| Medicago sativa | AGCTCACTGTTCTTTGTGATGCTAAGGTTT | |
| Arg24Term | AAACCTTAGCATCACAAAGAACAGTGAGCTCATTGGCCTTCTTGAA | 4894 |
| CGA-TGA | AAGACCATCCCTTCATTTTGAGTAAGTTACTTGTCTGTTCGTTGTGT | |
| | TCTCTATTCTCTTGATCTGGATCTTTCC | |
| | ACTCAAAATGAAGGGAT | 4895 |
| | ATCCCTTCATTTTGAGT | 4896 |
| Male-sterile | GGCTCGTGGTAAGATCCAGATCAAGAAAATAGAAAACCAAACAAAT | 4897 |
| DEF4 | AGGCAAGTGACTTAGTCAAAGAGAAGAAATGGGCTATTCAAGAAG | |
| Solanum tuberosum | GCTAATGAACTTACAGTTCTTTGTGATGCT | |
| Tyr21Term | AGCATCACAAAGAACTGTAAGTTCATTAGCCTTCTTGAATAGCCCA | 4898 |
| TAT-TAG | TTTCTTCTCTTTGACTAAGTCACTTGCCTATTTGTTTGGTTTTCTATT | |
| | TTCTTGATCTGGATCTTACCACGAGCC | |
| | GTGACTTAGTCAAAGAG | 4899 |
| | CTCTTTGACTAAGTCAC | 4900 |
| Male-sterile | CTCGTGGTAAGATCCAGATCAAGAAAATAGAAAACCAAACAAATAG | 4901 |
| DEF4 | GCAAGTGACTTATTGAAAGAGAAGAAATGGGCTATTCAAGAAGGC | |
| Solanum tuberosum | TAATGAACTTACAGTTCTTTGTGATGCTAA | |
| Ser22Term | TTAGCATCACAAAGAACTGTAAGTTCATTAGCCTTCTTGAATAGCC | 4902 |
| TCA-TGA | CATTTCTTCTCTTTCAATAAGTCACTTGCCTATTTGTTTGGTTTTCTA | |
| | TTTTCTTGATCTGGATCTTACCACGAG | |
| | GACTTATTGAAAGAGAA | 4903 |
| | TTCTCTTTCAATAAGTC | 4904 |
| Male-sterile | CGTGGTAAGATCCAGATCAAGAAAATAGAAAACCAAACAAATAGG | 4905 |
| DEF4 | CAAGTGACTTATTCATAGAGAAGAAATGGGCTATTCAAGAAGGCTA | |
| Solanum tuberosum | ATGAACTTACAGTTCTTTGTGATGCTAAAG | |
| Lys23Term | CTTTAGCATCACAAAGAACTGTAAGTTCATTAGCCTTCTTGAATAG | 4906 |
| AAG-TAG | CCCATTTCTTCTCTATGAATAAGTCACTTGCCTATTTGTTTGGTTTT | |
| | CTATTTTCTTGATCTGGATCTTACCACG | |
| | CTTATTCATAGAGAAGA | 4907 |
| | TCTTCTCTATGAATAAG | 4908 |
| Male-sterile | GGTAAGATCCAGATCAAGAAAATAGAAAACCAAACAAATAGGCAA | 4909 |
| DEF4 | GTGACTTATTCAAAGTGAAGAAATGGGCTATTCAAGAAGGCTAATG | |
| Solanum tuberosum | AACTTACAGTTCTTTGTGATGCTAAAGTTT | |
| Arg24Term | AAACTTTAGCATCACAAAGAACTGTAAGTTCATTAGCCTTCTTGAAT | 4910 |
| AGA-TGA | AGCCCATTTCTTCACTTTGAATAAGTCACTTGCCTATTTGTTTGGTT | |
| | TTCTATTTTCTTGATCTGGATCTTACC | |
| | ATTCAAAGTGAAGAAAT | 4911 |
| | ATTTCTTCACTTTGAAT | 4912 |
| Male-sterile | GCTAATGAACTTACTGTTCTTTGTGATGCTAAAGTTTCAATTGTTAT | 4913 |
| AP3 | GATTTCTAGTACTTGAAAACTTCATGAGTTTATAAGTCCCTCTATCA | |
| Lycopersicon | CGACCAAACAATTGTTCGATCTGTACC | |
| esculentum | GGTACAGATCGAACAATTGTTTGGTCGTGATAGAGGGACTTATAAA | 4914 |
| Gly21Term | CTCATGAAGTTTTCAAGTACTAGAAATCATAACAATTGAAACTTTAG | |
| GGA-TGA | CATCACAAAGAACAGTAAGTTCATTAGC | |
| | CTAGTACTTGAAAACTT | 4915 |
| | AAGTTTTCAAGTACTAG | 4916 |
| Male-sterile | AATGAACTTACTGTTCTTTGTGATGCTAAAGTTTCAATTGTTATGAT | 4917 |
| AP3 | TTCTAGTACTGGATAACTTCATGAGTTTATAAGTCCCTCTATCACGA | |
| Lycopersicon | CCAAACAATTGTTCGATCTGTACCAGA | |
| esculentum | TCTGGTACAGATCGAACAATTGTTTGGTCGTGATAGAGGGACTTAT | 4918 |
| Lys28Term | AAACTCATGAAGTTATCCAGTACTAGAAATCATAACAATTGAAACTT | |
| AAA-TAA | TAGCATCACAAAGAACAGTAAGTTCATT | |
| | GTACTGGATAACTTCAT | 4919 |
| | ATGAAGTTATCCAGTAC | 4920 |
| Male-sterile | ACTGTTCTTTGTGATGCTAAAGTTTCAATTGTTATGATTTCTAGTAC | 4921 |
| AP3 | TGGAAAACTTCATTAGTTTATAAGTCCCTCTATCACGACCAAACAAT | |
| Lycopersicon | TGTTCGATCTGTACCAGAAGACTATTG | |
| esculentum | CAATAGTCTTCTGGTACAGATCGAACAATTGTTTGGTCGTGATAGA | 4922 |
| Glu31Term | GGGACTTATAAACTAATGAAGTTTTCCAGTACTAGAAATCATAACA | |
| GAG-TAG | ATTGAAACTTTAGCATCACAAAGAACAGT | |
| | AACTTCATTAGTTTATA | 4923 |
| | TATAAACTAATGAAGTT | 4924 |
| Male-sterile | ATTGTTATGATTTCTAGTACTGGAAAACTTCATGAGTTTATAAGTCC | 4925 |
| AP3 | CTCTATCACGACCTAACAATTGTTCGATCTGTACCAGAAGACTATT | |
| Lycopersicon | GGAGTTGATATTTGGACTACTCACTATG | |
| esculentum | CATAGTGAGTAGTCCAAATATCAACTCCAATAGTCTTCTGGTACAG | 4926 |
| Lys40Term | ATCGAACAATTGTTAGGTCGTGATAGAGGGACTTATAAACTCATGA | |
| AAA-TAA | AGTTTTCCAGTACTAGAAATCATAACAAT | |
| | TCACGACCTAACAATTG | 4927 |
| | CAATTGTTAGGTCGTGA | 4928 |
| Male-sterile | GGGGCGGGGGAAGATTGAGATAAAGCGGATCGAGAACGCCACCA | 4929 |
| AP3 | ACAGGCAGGTGACCTAGTCCAAGCGCCGGTCGGGGATCATGAAG | |
| Triticum aestivum | AAGGCGCGGGAGCTCACCGTGCTCTGCGACGCC | |
| Tyr21Term | GGCGTCGCAGAGCACGGTGAGCTCCCGCGCCTTCTTCATGATCC | 4930 |
| TAC-TAG | CCGACCGGCGCTTGGACTAGGTCACCTGCCTGTTGGTGGCGTTCT | |
| | CGATCCGCTTTATCTCAATCTTCCCCCGCCCC | |
| | GTGACCTAGTCCAAGCG | 4931 |
| | CGCTTGGACTAGGTCAC | 4932 |
| Male-sterile | CGGGGGAAGATTGAGATAAAGCGGATCGAGAACGCCACCAACAG | 4933 |
| AP3 | GCAGGTGACCTACTCCTAGCGCCGGTCGGGGATCATGAAGAAGG | |
| Triticum aestivum | CGCGGGAGCTCACCGTGCTCTGCGACGCCCAGG | |
| Lys23Term | CCTGGGCGTCGCAGAGCACGGTGAGCTCCCGCGCCTTCTTCATG | 4934 |
| AAG-TAG | ATCCCCGACCGGCGCTAGGAGTAGGTCACCTGCCTGTTGGTGGC | |
| | GTTCTCGATCCGCTTTATCTCAATCTTCCCCCG | |
| | CCTACTCCTAGCGCCGG | 4935 |
| | CCGGCGCTAGGAGTAGG | 4936 |
| Male-sterile | TTGAGATAAAGCGGATCGAGAACGCCACCAACAGGCAGGTGACCT | 4937 |
| AP3 | ACTCCAAGCGCCGGTAGGGGATCATGAAGAAGGCGCGGGAGCTC | |
| Triticum aestivum | ACCGTGCTCTGCGACGCCCAGGTCGCCATCAT | |
| Ser26Term | ATGATGGCGACCTGGGCGTCGCAGAGCACGGTGAGCTCCCGCGC | 4938 |
| TCG-TAG | CTTCTTCATGATCCCCTACCGGCGCTTGGAGTAGGTCACCTGCCT | |
| | GTTGGTGGCGTTCTCGATCCGCTTTATCTCAA | |
| | GCGCCGGTAGGGGATCA | 4939 |
| | TGATCCCCTACCGGCGC | 4940 |
| Male-sterile | CGGATCGAGAACGCCACCAACAGGCAGGTGACCTACTCCAAGCG | 4941 |
| AP3 | CCGGTCGGGGATCATGTAGAAGGCGCGGGAGCTCACCGTGCTCT | |
| Triticum aestivum | GCGACGCCCAGGTCGCCATCATCATGTTCTCCT | |
| Lys30Term | AGGAGAACATGATGATGGCGACCTGGGCGTCGCAGAGCACGGTG | 4942 |
| AAG-TAG | AGCTCCCGCGCCTTCTACATGATCCCCGACCGGCGCTTGGAGTAG | |
| | GTCACCTGCCTGTTGGTGGCGTTCTCGATCCG | |
| | GGATCATGTAGAAGGCG | 4943 |
| | CGCCTTCTACATGATCC | 4944 |
| Male-sterile | GGGGCGCGGCAAGATCGAGATCAAGCGGATCGAGAACGCCACCA | 4945 |
| Silky1 | ACCGCCAGGTGACCTAGTCCAAGCGCCGGACGGGGATCATGAAG | |
| Zea mays | AAGGCACGCGAGCTCACCGTGCTCTGCGACGCC | |
| Tyr21Term | GGCGTCGCAGAGCACGGTGAGCTCGCGTGCCTTCTTCATGATCCC | 4946 |
| TAC-TAG | CGTCCGGCGCTTGGACTAGGTCACCTGGCGGTTGGTGGCGTTCT | |
| | CGATCCGCTTGATCTCGATCTTGCCGCGCCCC | |
| | GTGACCTAGTCCAAGCG | 4947 |
| | CGCTTGGACTAGGTCAC | 4948 |
| Male-sterile | CGCGGCAAGATCGAGATCAAGCGGATCGAGAACGCCACCAACCG | 4949 |
| Silky1 | CCAGGTGACCTACTCCTAGCGCCGGACGGGGATCATGAAGAAGG | |
| Zea mays | CACGCGAGCTCACCGTGCTCTGCGACGCCCAGG | |
| Lys23Term | CCTGGGCGTCGCAGAGCACGGTGAGCTCGCGTGCCTTCTTCATG | 4950 |
| AAG-TAG | ATCCCCGTCCGGCGCTAGGAGTAGGTCACCTGGCGGTTGGTGGC | |
| | GTTCTCGATCCGCTTGATCTCGATCTTGCCGCG | |
| | CCTACTCCTAGCGCCGG | 4951 |
| | CCGGCGCTAGGAGTAGG | 4952 |
| Male-sterile | CGGATCGAGAACGCCACCAACCGCCAGGTGACCTACTCCAAGCG | 4953 |
| Silky1 | CCGGACGGGGATCATGTAGAAGGCACGCGAGCTCACCGTGCTCT | |
| Zea mays | GCGACGCCCAGGTCGCCATCATCATGTTCTCCT | |
| Lys30Term | AGGAGAACATGATGATGGCGACCTGGGCGTCGCAGAGCACGGTG | 4954 |
| AAG-TAG | AGCTCGCGTGCCTTCTACATGATCCCCGTCCGGCGCTTGGAGTAG | |
| | GTCACCTGGCGGTTGGTGGCGTTCTCGATCCG | |
| | GGATCATGTAGAAGGCA | 4955 |
| | TGCCTTCTACATGATCC | 4956 |
| Male-sterile | ATCGAGAACGCCACCAACCGCGAGGTGACCTACTCCAAGCGCCG | 4957 |
| Silky1 | GACGGGGATCATGAAGTAGGCACGCGAGCTCACCGTGCTCTGCG | |
| Zea mays | ACGCCCAGGTCGCCATCATCATGTTCTCCTCCA | |
| Lys31Term | TGGAGGAGAACATGATGATGGCGACCTGGGCGTCGCAGAGCACG | 4958 |
| AAG-TAG | GTGAGCTCGCGTGCCTACTTCATGATCCCCGTCCGGCGCTTGGAG | |
| | TAGGTCACCTGGCGGTTGGTGGCGTTCTCGAT | |
| | TCATGAAGTAGGCACGC | 4959 |
| | GCGTGCCTACTTCATGA | 4960 |
| Male-sterile | GCTAGCTGCATTGTCCGGCGAGAGAGATAGCTGCTGCAGGGGGC | 4961 |
| AP3 | GGCCATGGGGAGGGGCTAGATCGAGATCAAGCGGATCGAGAACG | |
| Oryza sativa | CGACCAACAGGCAGGTGACCTACTCGAAGCGCC | |
| Lys5Term | GGCGCTTCGAGTAGGTCACCTGCCTGTTGGTCGCGTTCTCGATCC | 4962 |
| AAG-TAG | GCTTGATCTCGATCTAGCCCCTCCCCATGGCCGCCCCCTGCAGGA | |
| | GCTATCTCTCTCGCCGGACAATGCAGCTAGC | |
| | GGAGGGGCTAGATCGAG | 4963 |
| | CTCGATCTAGCCCCTCC | 4964 |
| Male-sterile | TGCATTGTCCGGCGAGAGAGATAGCTGCTGCAGGGGGCGGCCAT | 4965 |
| AP3 | GGGGAGGGGCAAGATCTAGATCAAGGGGATCGAGAACGCGACCA | |
| Oryza sativa | ACAGGCAGGTGACCTACTCGAAGCGCCGCACGG | |
| Glu7Term | CCGTGCGGCGCTTCGAGTAGGTCACCTGCCTGTTGGTCGCGTTCT | 4966 |
| GAG-TAG | CGATCCGCTTGATCTAGATCTTGCCCCTCCCCATGGCCGCCCCCT | |
| | GCAGCAGCTATCTCTCTCGCCGGACAATGCA | |
| | GCAAGATCTAGATCAAG | 4967 |
| | CTTGATCTAGATCTTGC | 4968 |
| Male-sterile | GTCCGGCGAGAGAGATAGCTGCTGCAGGGGGCGGCCATGGGGA | 4969 |
| AP3 | GGGGCAAGATCGAGATCTAGCGGATCGAGAACGCGACCAACAGG | |
| Oryza sativa | CAGGTGACCTACTCGAAGCGCCGCACGGGGATCA | |
| Lys9Term | TGATCCCCGTGCGGCGCTTCGAGTAGGTCACCTGCCTGTTGGTCG | 4970 |
| AAG-TAG | CGTTCTCGATCCGCTAGATCTCGATCTTGCCCCTCCCCATGGCCG | |
| | CCCCCTGCAGCAGCTATCTCTCTCGCCGGAC | |
| | TCGAGATCTAGCGGATC | 4971 |
| | GATCCGCTAGATCTCGA | 4972 |
| Male-sterile | GAGAGATAGCTGCTGCAGGGGGCGGCCATGGGGAGGGGCAAGA | 4973 |
| AP3 | TCGAGATCAAGCGGATCTAGAACGCGACCAACAGGCAGGTGACCT | |
| Oryza sativa | ACTCGAAGCGCCGCACGGGGATCATGAAGAAGG | |
| Glu12Term | CCTTCTTCATGATCCCCGTGCGGCGCTTCGAGTAGGTCACCTGCC | 4974 |
| GAG-TAG | TGTTGGTCGCGTTCTAGATCCGCTTGATCTCGATCTTGCCCCTCCC | |
| | CATGGCCGCCCCCTGCAGCAGCTATCTCTC | |
| | AGCGGATCTAGAACGCG | 4975 |
| | CGCGTTCTAGATCCGCT | 4976 |

[0255] TABLE 33

Oligonucleotides to produce male-sterile plants

| | |
|---|---|
| Phenotype, Gene, | SEQ |

| | | |
|---|---|---|
| Plant & Targeted | | ID |
| Alteration | Altering Oligos | NO: |

| | | |
|---|---|---|
| Male-sterile | TCTGTACTAATCAAATTTTGCCCTAAACGTTTTTGGCTTTGGAGCA | 4977 |
| AG | GCAATCACGGCGTAGCAATCGGAGCTAGGAGGAGATTCCTCTCC | |
| Arabidopsis thaliana | CTTGAGGAAATCTGGGAGAGGAAAGATCGAA | |
| Tyr35Term | TTCGATCTTTCCTCTCCCAGATTTCCTCAAGGGAGAGGAATCTCCT | 4978 |
| TAC-TAG | CCTAGCTCCGATTGCTACGCCGTGATTGCTGCTCCAAAGCCAAAA | |
| | ACGTTTAGGGCAAAATTTGATTAGTACAGA | |
| | ACGGCGTAGCAATCGGA | 4979 |
| | TCCGATTGCTACGCCGT | 4980 |
| Male-sterile | CTGTACTAATCAAATTTTGCCCTAAACGTTTTTGGCTTTGGAGCAG | 4981 |
| AG | CAATCACGGCGTACTAATCGGAGCTAGGAGGAGATTCCTCTCCCT | |
| Arabidopsis thaliana | TGAGGAAATCTGGGAGAGGAAAGATCGAAA | |
| Gln36Term | TTTCGATCTTTCCTCTCCCAGATTTCCTCAAGGGAGAGGAATCTCC | 4982 |
| CAA-TAA | TCCTAGCTCCGATTAGTACGCCGTGATTGCTGCTCCAAAGCCAAA | |
| | AACGTTTAGGGCAAAATTTGATTAGTACAG | |
| | CGGCGTACTAATCGGAG | 4983 |
| | CTCCGATTAGTACGCCG | 4984 |
| Male-sterile | ACTAATCAAATTTTGCCCTAAACGTTTTTGGCTTTGGAGCAGCAAT | 4985 |
| AG | CACGGCGTACCAATAGGAGCTAGGAGGAGATTCCTCTCCCTTGA | |
| Arabidopsis thaliana | GGAAATCTGGGAGAGGAAAGATCGAAATCAA | |
| Ser31Term | TTGATTTCGATCTTTCCTCTCCCAGATTTCCTCAAGGGAGAGGAAT | 4986 |
| TCG-TAG | CTCCTCCTAGCTCCTATTGGTACGCCGTGATTGCTGCTCCAAAGC | |
| | CAAAAACGTTTAGGGCAAAATTTGATTAGT | |
| | GTACCAATAGGAGCTAG | 4987 |
| | CTAGCTCCTATTGGTAC | 4988 |
| Male-sterile | TAATCAAATTTTGCCCTAAACGTTTTTGGCTTTGGAGCAGCAATCA | 4989 |
| AG | CGGCGTACCAATCGTAGCTAGGAGGAGATTCCTCTCCCTTGAGGA | |
| Arabidopsis thaliana | AATCTGGGAGAGGAAAGATCGAAATCAAAC | |
| Glu38Term | GTTTGATTTCGATCTTTCCTCTCCCAGATTTCCTCAAGGGAGAGGA | 4990 |
| GAG-TAG | ATCTCCTCCTAGCTACGATTGGTACGCCGTGATTGCTGCTCCAAA | |
| | GCCAAAAACGTTTAGGGCAAAATTTGATTA | |
| | ACCAATCGTAGCTAGGA | 4991 |
| | TCCTAGCTACGATTGGT | 4992 |
| Male-sterile | CTCTCCCACTTCTTTTCGGTGGTTTATTCATTTGGTGACGATATCA | 4993 |
| AG | CAGAAGCAATGGATTAAGGTGGGAGTAGTCACGATGCAGAGAGT | |
| Brassica napus | AGCAAGAAGATAGGTAGAGGGAAGATAGAGA | |
| Glu3Term | TCTCTATCTTCCCTCTACCTATCTTCTTGCTACTCTCTGCATCGTGA | 4994 |
| GAA-TAA | CTACTCCCACCTTAATCCATTGCTTCTGTGATATCGTCACCAAATG | |
| | AATAAACCACCGAAAAGAAGTGGGAGAG | |
| | CAATGGATTAAGGTGGG | 4995 |
| | CCCACCTTAATCCATTG | 4996 |
| Male-sterile | TATTCATTTGGTGACGATATCACAGAAGCAATGGATGAAGGTGGG | 4997 |
| AG | AGTAGTCACGATGCATAGAGTAGCAAGAAGATAGGTAGAGGGAA | |
| Brassica napus | GATAGAGATAAAGAGGATAGAGAACACAACAA | |
| Glu11Term | TTGTTGTGTTCTCTATCCTCTTTATCTCTATCTTCCCTCTACCTATC | 4998 |
| GAG-TAG | TTCTTGCTACTCTATGCATCGTGACTACTCCCACCTTCATCCATTG | |
| | CTTCTGTGATATCGTCACCAAATGAATA | |
| | ACGATGCATAGAGTAGC | 4999 |
| | GCTACTCTATGCATCGT | 5000 |
| Male-sterile | GGTGACGATATCACAGAAGCAATGGATGAAGGTGGGAGTAGTCA | 5001 |
| AG | CGATGCAGAGAGTAGCTAGAAGATAGGTAGAGGGAAGATAGAGA | |
| Brassica napus | TAAAGAGGATAGAGAACACAACAAATCGTCAAG | |
| Lys14Term | CTTGACGATTTGTTGTGTTCTCTATCCTCTTTATCTCTATCTTCCCT | 5002 |
| AAG-TAG | CTACCTATCTTCTAGCTACTCTCTGCATCGTGACTACTCCCACCTT | |
| | CATCCATTGCTTCTGTGATATCGTCACC | |
| | AGAGTAGCTAGAAGATA | 5003 |
| | TATCTTCTAGCTACTCT | 5004 |
| Male-sterile | GACGATATCACAGAAGCAATGGATGAAGGTGGGAGTAGTCACGA | 5005 |
| AG | TGCAGAGAGTAGCAAGTAGATAGGTAGAGGGAAGATAGAGATAAA | |
| Brassica napus | GAGGATAGAGAACACAACAAATCGTCAAGTAA | |
| Lys15Term | TTACTTGACGATTTGTTGTGTTCTCTATCCTCTTTATCTCTATCTTC | 5006 |
| AAG-TAG | CCTCTACCTATCTACTTGCTACTCTCTGCATCGTGACTACTCCCAC | |
| | CTTCATCCATTGCTTCTGTGATATCGTC | |
| | GTAGCAAGTAGATAGGT | 5007 |
| | ACCTATCTACTTGCTAC | 5008 |
| Male-sterile | CAACCAAAAAACTTAAAAATCTTCTCTTTCCTTTCCTTACAAGGTGA | 5009 |
| AG | AGTAATGGACTTCTAAAGTGATCTAACCAGAGAGATCTCACCACAA | |
| Lycopersicon | AGGAAACTAGGAAGGGGGAAAATTGAGA | |
| esculentum | TCTCAATTTTCCCCCTTCCTAGTTTCCTTTGTGGTGAGATCTCTCT | 5010 |
| Glu4Term | GGTTAGATCACTTTAGAAGTCCATTACTTCACCTTGTAAGGAAAGG | |
| CAA-TAA | AAAGAGAAGATTTTTAAGTTTTTTGGTTG | |
| | TGGACTTCTAAAGTGAT | 5011 |
| | ATCACTTTAGAAGTCCA | 5012 |
| Male-sterile | AAAATCTTCTCTTTCCTTTCCTTACAAGGTGAAGTAATGGACTTCC | 5013 |
| AG | AAAGTGATCTAACCTGAGAGATCTCACCACAAAGGAAACTAGGAA | |
| Lycopersicon | GGGGGAAAATTGAGATCAAAAGGATCGAAA | |
| esculentum | TTTCGATCCTTTTGATCTCAATTTTCCCCCTTCCTAGTTTCCTTTGT | 5014 |
| Arg9Term | GGTGAGATCTCTCAGGTTAGATCACTTTGGAAGTCCATTACTTCAC | |
| AGA-TGA | CTTGTAAGGAAAGGAAAGAGAAGATTTT | |
| | ATCTAACCTGAGAGATC | 5015 |
| | GATCTCTCAGGTTAGAT | 5016 |
| Male-sterile | ATCTTCTCTTTCCTTTCCTTACAAGGTGAAGTAATGGACTTCCAAA | 5017 |
| AG | GTGATCTAACCAGATAGATCTCACCACAAAGGAAACTAGGAAGGG | |
| Lycopersicon | GGAAAATTGAGATCAAAAGGATCGAAAACA | |
| esculentum | TGTTTTCGATCCTTTTGATCTCAATTTTCCCCCTTCCTAGTTTCCTT | 5018 |
| Glu10Term | TGTGGTGAGATCTATCTGGTTAGATCACTTTGGAAGTCCATTACTT | |
| GAG-TAG | CACCTTGTAAGGAAAGGAAAGAGAAGAT | |
| | TAACCAGATAGATCTCA | 5019 |
| | TGAGATCTATCTGGTTA | 5020 |
| Male-sterile | CTTTCCTTTCCTTACAAGGTGAAGTAATGGACTTCCAAAGTGATCT | 5021 |
| AG | AACCAGAGAGATCTGACCACAAAGGAAACTAGGAAGGGGGAAAA | |
| Lycopersicon | TTGAGATCAAAAGGATCGAAAACACGACGAA | |
| esculentum | TTCGTCGTGTTTTCGATCCTTTTGATCTCAATTTTCCCCCTTCCTAG | 5022 |
| Ser12Term | TTTCCTTTGTGGTCAGATCTCTCTGGTTAGATCACTTTGGAAGTCC | |
| TCA-TGA | ATTACTTCACCTTGTAAGGAAAGGAAAG | |
| | AGAGATCTGACCACAAA | 5023 |
| | TTTGTGGTCAGATCTCT | 5024 |
| Male-sterile | GTACTCTCTATTTTCATCTTCCAACCCTTTCTTTCCTTACCAGGTGA | 5025 |
| NAG1 | AAGTATGGACTTCTAAAGTGATCTAACAAGAGAGATCTCTCCACAA | |
| Nicotiana tabacum | AGGAAACTGGGAAGAGGAAAGATTGAGA | |
| Gln4Term | TCTCAATCTTTCCTCTTCCCAGTTTCCTTTGTGGAGAGATCTCTCTT | 5026 |
| CAA-TAA | GTTAGATCACTTTAGAAGTCCATACTTTCACCTGGTAAGGAAAGAA | |
| | AGGGTTGGAAGATGAAAATAGAGAGTAC | |
| | TGGACTTCTAAAGTGAT | 5027 |
| | ATCACTTTAGAAGTCCA | 5028 |
| Male-sterile | ATCTTCCAACCCTTTCTTTCCTTACCAGGTGAAAGTATGGACTTCC | 5029 |
| NAG1 | AAAGTGATCTAACATGAGAGATCTCTCCACAAAGGAAACTGGGAA | |
| Nicotiana tabacum | GAGGAAAGATTGAGATCAAACGGATCGAAA | |
| Arg9Term | TTTCGATCCGTTTGATCTCAATCTTTCCTCTTCCCAGTTTCCTTTGT | 5030 |
| AGA-TGA | GGAGAGATCTCTCATGTTAGATCACTTTGGAAGTCCATACTTTCAC | |
| | CTGGTAAGGAAAGAAAGGGTTGGAAGAT | |
| | ATCTAACATGAGAGATC | 5031 |
| | GATCTCTCATGTTAGAT | 5032 |
| Male-sterile | TTCCAACCCTTTCTTTCCTTACCAGGTGAAAGTATGGACTTCCAAA | 5033 |
| NAG1 | GTGATCTAACAAGATAGATCTCTCCACAAAGGAAACTGGGAAGAG | |
| Nicotiana tabacum | GAAAGATTGAGATCAAACGGATCGAAAACA | |
| Glu10Term | TGTTTTCGATCCGTTTGATCTCAATCTTTCCTCTTCCCAGTTTCCTT | 5034 |
| GAG-TAG | TGTGGAGAGATCTATCTTGTTAGATCACTTTGGAAGTCCATACTTT | |
| | CACCTGGTAAGGAAAGAAAGGGTTGGAA | |
| | TAACAAGATAGATCTCT | 5035 |
| | AGAGATCTATCTTGTTA | 5036 |
| Male-sterile | CTTTCCTTACCAGGTGAAAGTATGGACTTCCAAAGTGATCTAACAA | 5037 |
| NAG1 | GAGAGATCTCTCCATAAAGGAAACTGGGAAGAGGAAAGATTGAGA | |
| Nicotiana tabacum | TCAAACGGATCGAAAACACAACGAATCGTC | |
| Gln14Term | GACGATTCGTTGTGTTTTCGATCCGTTTGATCTCAATCTTTCCTCTT | 5038 |
| CAA-TAA | CCCAGTTTCCTTTATGGAGAGATCTCTCTTGTTAGATCACTTTGGA | |
| | AGTCCATACTTTCACCTGGTAAGGAAAG | |
| | TCTCTCCATAAAGGAAA | 5039 |
| | TTTCCTTTATGGAGAGA | 5040 |
| Male-sterile | GCCTATGAAAACAAACCCAACACGGTCCTGGACGCTGATGCCCAA | 5041 |
| AG | AGAAGATTGGGAAGGTGAAAGATCGAGATCAAGCGGATCGAAAA | |
| Rosa hybrida | CACCACCAATCGTCAAGTCACCTTCTGCAAAA | |
| Gly22Term | TTTTGCAGAAGGTGACTTGACGATTGGTGGTGTTTTCGATCCGCT | 5042 |
| GGA-TGA | TGATCTCGATCTTTCACCTTCCCAATCTTCTTTGGGCATCAGCGTC | |
| | CAGGACCGTGTTGGGTTTGTTTTCATAGGC | |
| | TGGGAAGGTGAAAGATC | 5043 |
| | GATCTTTCACCTTCCCA | 5044 |
| Male-sterile | TATGAAAACAAACCCAACACGGTCCTGGACGCTGATGCCCAAAGA | 5045 |
| AG | AGATTGGGAAGGGGATAGATCGAGATCAAGCGGATCGAAAACAC | |
| Rosa hybrida | CACCAATCGTCAAGTCACCTTCTGCAAAAGGC | |
| Lys23Term | GCCTTTTGCAGAAGGTGACTTGACGATTGGTGGTGTTTTCGATCC | 5046 |
| AAG-TAG | GCTTGATCTCGATCTATCCCCTTCCCAATCTTCTTTGGGCATCAGC | |
| | GTCCAGGACCGTGTTGGGTTTGTTTTCATA | |
| | GAAGGGGATAGATCGAG | 5047 |
| | CTCGATCTATCCCCTTC | 5048 |
| Male-sterile | AACAAACCCAACACGGTCCTGGACGCTGATGCCCAAAGAAGATTG | 5049 |
| AG | GGAAGGGGAAAGATCTAGATCAAGCGGATCGAAAACACCACCAA | |
| Rosa hybrida | TCGTCAAGTCACCTTCTGCAAAAGGCGCAATG | |
| Glu25Term | CATTGCGCCTTTTGCAGAAGGTGACTTGACGATTGGTGGTGTTTT | 5050 |
| GAG-TAG | CGATCCGCTTGATCTAGATCTTTCCCCTTCCCAATCTTCTTTGGGC | |
| | ATCAGCGTCCAGGACCGTGTTGGGTTTGTT | |
| | GAAAGATCTAGATCAAG | 5051 |
| | CTTGATCTAGATCTTTC | 5052 |
| Male-sterile | CCCAACACGGTCCTGGACGCTGATGCCCAAAGAAGATTGGGAAG | 5053 |
| AG | GGGAAAGATCGAGATCTAGCGGATCGAAAACACCACCAATCGTCA | |
| Rosa hybrida | AGTCACCTTCTGCAAAAGGCGCAATGGTTTGC | |
| Lys27 | GCAAACCATTGCGCCTTTTGCAGAAGGTGACTTGACGATTGGTGG | 5054 |
| AAG-TAG | TGTTTTCGATCCGCTAGATCTCGATCTTTCCCCTTCCCAATCTTCT | |
| | TTGGGCATCAGCGTCCAGGACCGTGTTGGG | |
| | TCGAGATCTAGCGGATC | 5055 |
| | GATCCGCTAGATCTCGA | 5056 |
| Male-sterile | CAATTGCCTGTTTTTATTTTTTTTCTTTTTGACTAAGTAGAAATGGC | 5057 |
| far | GTCTCTAAGCGATTAATCGACCGAGGTATCGCCCGAGAGGAAAAT | |
| Antirrhinum majus | CGGGAGAGGAAAGATCGAGATCAAACGGA | |
| Gln7Term | TCCGTTTGATCTCGATCTTTCCTCTCCCGATTTTCCTCTCGGGCGA | 5058 |
| CAA-TAA | TACCTCGGTCGATTAATCGCTTAGAGACGCCATTTCTACTTAGTCA | |
| | AAAAGAAAAAAAATAAAAACAGGCAATTG | |
| | TAAGCGATTAATCGACC | 5059 |
| | GGTCGATTAATCGCTTA | 5060 |
| Male-sterile | GTTTTTATTTTTTTTCTTTTTGACTAAGTAGAAATGGCGTCTCTAAG | 5061 |
| far | CGATCAATCGACCTAGGTATCGCCCGAGAGGAAAATCGGGAGAG | |
| Antirrhinum majus | GAAAGATCGAGATCAAACGGATCGAAAACA | |
| Glu10Term | TGTTTTCGATCCGTTTGATCTCGATCTTTCCTCTCCCGATTTTCCTC | 5062 |
| GAG-TAG | TCGGGCGATACCTAGGTCGATTGATCGCTTAGAGACGCCATTTCT | |
| | ACTTAGTCAAAAAGAAAAAAAATAAAAAC | |
| | AATCGACCTAGGTATCG | 5063 |
| | CGATACCTAGGTCGATT | 5064 |
| Male-sterile | TTTCTTTTTGACTAAGTAGAAATGGCGTCTCTAAGCGATCAATCGA | 5065 |
| far | CCGAGGTATCGCCCTAGAGGAAAATCGGGAGAGGAAAGATCGAG | |
| Antirrhinum majus | ATCAAACGGATCGAAAACAAAACAAATCAAC | |
| Glu14Term | GTTGATTTGTTTTGTTTTCGATCCGTTTGATCTCGATCTTTCCTCTC | 5066 |
| GAG-TAG | CCGATTTTCCTCTAGGGCGATACCTCGGTCGATTGATCGCTTAGA | |
| | GACGCCATTTCTACTTAGTCAAAAAGAAA | |
| | TATCGCCCTAGAGGAAA | 5067 |
| | TTTCCTCTAGGGCGATA | 5068 |
| Male-sterile | TTTGACTAAGTAGAAATGGCGTCTCTAAGCGATCAATCGACCGAG | 5069 |
| far | GTATCGCCCGAGAGGTAAATCGGGAGAGGAAAGATCGAGATCAA | |
| Antirrhinum majus | ACGGATCGAAAACAAAACAAATCAACAGGTTA | |
| Lys16Term | TAACCTGTTGATTTGTTTTGTTTTCGATCCGTTTGATCTCGATCTTT | 5070 |
| AAA-TAA | CCTCTCCCGATTTACCTCTCGGGCGATACCTCGGTCGATTGATCG | |
| | CTTAGAGACGCCATTTCTACTTAGTCAAA | |
| | CCGAGAGGTAAATCGGG | 5071 |
| | CCCGATTTACCTCTCGG | 5072 |
| Male-sterile | TGTCCAAGCATTATCAGTCACCACTCACAAGAATGATTAAGGAAGA | 5073 |
| AG | AGGAAAGGGTAAGTAGCAAATAAAGGGGATGTTCCAGAATCAAGA | |
| Cucumis sativus | AGAGAAGATGTCAGACTCGCCTCAGAGGAA | |
| Leu21Term | TTCCTCTGAGGCGAGTCTGACATCTTCTCTTCTTGATTCTGGAACA | 5074 |
| TTG-TAG | TCCCCTTTATTTGCTACTTACCCTTTCCTTCTTCCTTAATCATTCTT | |
| | GTGAGTGGTGACTGATAATGCTTGGACA | |
| | GGGTAAGTAGCAAATAA | 5075 |
| | TTATTTGCTACTTACCC | 5076 |
| Male-sterile | TCCAAGCATTATCAGTCACCACTCACAAGAATGATTAAGGAAGAA | 5077 |
| AG | GGAAAGGGTAAGTTGTAAATAAAGGGGATGTTCCAGAATCAAGAA | |
| Cucumis sativus | GAGAAGATGTCAGACTCGCCTCAGAGGAAGA | |
| Gln22Term | TCTTCCTCTGAGGCGAGTCTGACATCTTCTCTTCTTGATTCTGGAA | 5078 |
| CAA-TAA | CATCCCCTTTATTTACAACTTACCCTTTCCTTCTTCCTTAATCATTC | |
| | TTGTGAGTGGTGACTGATAATGCTTGGA | |
| | GTAAGTTGTAAATAAAG | 5079 |
| | CTTTATTTACAACTTAC | 5080 |
| Male-sterile | CATTATCAGTCACCACTCACAAGAATGATTAAGGAAGAAGGAAAG | 5081 |
| AG | GGTAAGTTGCAAATATAGGGGATGTTCCAGAATCAAGAAGAGAAG | |
| Cucumis sativus | ATGTCAGACTCGCCTCAGAGGAAGATGGGAA | |
| Lys24Term | TTCCCATCTTCCTCTGAGGCGAGTCTGACATCTTCTCTTCTTGATT | 5082 |
| AAG-TAG | CTGGAACATCCCCTATATTTGCAACTTACCCTTTCCTTCTTCCTTAA | |
| | TCATTCTTGTGAGTGGTGACTGATAATG | |
| | TGCAAATATAGGGGATG | 5083 |
| | CATCCCCTATATTTGCA | 5084 |
| Male-sterile | CCACTCACAAGAATGATTAAGGAAGAAGGAAAGGGTAAGTTGCAA | 5085 |
| AG | ATAAAGGGGATGTTCTAGAATCAAGAAGAGAAGATGTCAGACTCG | |
| Cucumis sativus | CCTCAGAGGAAGATGGGAAGAGGAAAGATTG | |
| Gln28Term | CAATCTTTCCTCTTCCCATCTTCCTCTGAGGCGAGTCTGACATCTT | 5086 |
| CAG-TAG | CTCTTCTTGATTCTAGAACATCCCCTTTATTTGCAACTTACCCTTTC | |
| | CTTCTTCCTTAATCATTCTTGTGAGTGG | |
| | GGATGTTCTAGAATCAA | 5087 |
| | TTGATTCTAGAACATCC | 5088 |
| Male-sterile | CCACCACCACCACCACCACCACCACCACACCATGCTCAACATGAT | 5089 |
| AG | GACTGATCTGAGCTGAGGGCCGTCGTCCAAGGTCAAGGAGCAGG | |
| Zea mays | TGGCGGCGGCGCCGACGGGCTCCGGCGACAGG | |
| Cys10Term | CCTGTCGCCGGAGCCCGTCGGCGCCGCCGCCACCTGCTCCTTGA | 5090 |
| TGC-TGA | CCTTGGACGACGGCCCTCAGCTCAGATCAGTCATCATGTTGAGCA | |
| | TGGTGTGGTGGTGGTGGTGGTGGTGGTGGTGG | |
| | CTGAGCTGAGGGCCGTC | 5091 |
| | GACGGCCCTCAGCTCAG | 5092 |
| Male-sterile | ACCACCACCACCACCACCACACCATGCTCAACATGATGACTGATC | 5093 |
| AG | TGAGCTGCGGGCCGTAGTCCAAGGTCAAGGAGCAGGTGGCGGC | |
| Zea mays | GGCGCCGACGGGCTCCGGCGACAGGCAGGGGCA | |
| Ser13Term | TGCCCCTGCCTGTCGCCGGAGCCCGTCGGCGCCGCCGCCACCT | 5094 |
| TCG-TAG | GCTCCTTGACCTTGGACTACGGCCCGCAGCTCAGATCAGTCATCA | |
| | TGTTGAGCATGGTGTGGTGGTGGTGGTGGTGGT | |
| | CGGGCCGTAGTCCAAGG | 5095 |
| | CCTTGGACTACGGCCCG | 5096 |
| Male-sterile | CACCACCACCACCACACCATGCTCAACATGATGACTGATCTGAGC | 5097 |
| AG | TGCGGGCCGTCGTCCTAGGTCAAGGAGCAGGTGGCGGCGGCGC | |
| Zea mays | CGACGGGCTCCGGCGACAGGCAGGGGCAGGGGA | |
| Lys15Term | TCCCCTGCCCCTGCCTGTCGCCGGAGCCCGTCGGCGCCGCCGC | 5098 |
| AAG-TAG | CACCTGCTCCTTGACCTAGGACGACGGCCCGCAGCTCAGATCAG | |
| | TCATCATGTTGAGCATGGTGTGGTGGTGGTGGTG | |
| | CGTCGTCCTAGGTCAAG | 5099 |
| | CTTGACCTAGGACGACG | 5100 |
| Male-sterile | CACCACCACACCATGCTCAACATGATGACTGATCTGAGCTGCGGG | 5101 |
| AG | CCGTCGTCCAAGGTCTAGGAGCAGGTGGCGGCGGCGCCGACGG | |
| Zea mays | GCTCCGGCGACAGGCAGGGGCAGGGGAGAGGCA | |
| Lys17Term | TGCCTCTCCCCTGCCCCTGCCTGTCGCCGGAGCCCGTCGGCGCC | 5102 |
| AAG-TAG | GCCGCCACCTGCTCCTAGACCTTGGACGACGGCCCGCAGCTCAG | |
| | ATCAGTCATCATGTTGAGCATGGTGTGGTGGTG | |
| | CCAAGGTCTAGGAGCAG | 5103 |
| | CTGCTCCTAGACCTTGG | 5104 |
| Male-sterile | TCCTACCTTTTCTCCTTCAGACCTCAAAATCTGTGTGATAGGAACA | 5105 |
| AG | AGAGCATGCACATCTGAGAAGAGGAGGCTACACCATCCACAGTAA | |
| Zea mays | CAGGCATCATGTCGACCCTGACTTCGGCGG | |
| Arg4Term | CCGCCGAAGTCAGGGTCGACATGATGCCTGTTACTGTGGATGGT | 5106 |
| CGA-TGA | GTAGCCTCCTCTTCTCAGATGTGCATGCTCTTGTTCCTATCACACA | |
| | GATTTTGAGGTCTGAAGGAGAAAAGGTAGGA | |
| | TGCACATCTGAGAAGAG | 5107 |
| | CTCTTCTCAGATGTGCA | 5108 |
| Male-sterile | TACCTTTTCTCCTTCAGACCTCAAAATCTGTGTGATAGGAACAAGA | 5109 |
| AG | GCATGCACATCCGATAAGAGGAGGCTACACCATCCACAGTAACAG | |
| Zea mays | GCATCATGTCGACCCTGACTTCGGCGGGGC | |
| Glu5Term | GCCCCGCCGAAGTCAGGGTCGACATGATGCCTGTTACTGTGGAT | 5110 |
| GAA-TAA | GGTGTAGCCTCCTCTTATCGGATGTGCATGCTCTTGTTCCTATCAC | |
| | ACAGATTTTGAGGTCTGAAGGAGAAAAGGTA | |
| | ACATCCGATAAGAGGAG | 5111 |
| | CTCCTCTTATCGGATGT | 5112 |
| Male-sterile | CTTTTCTCCTTCAGACCTCAAAATCTGTGTGATAGGAACAAGAGCA | 5113 |
| AG | TGCACATCCGAGAATAGGAGGCTACACCATCCACAGTAACAGGCA | |
| Zea mays | TCATGTCGACCCTGACTTCGGCGGGGCAGC | |
| Glu6Term | GCTGCCCCGCCGAAGTCAGGGTCGACATGATGCCTGTTACTGTG | 5114 |
| GAG-TAG | GATGGTGTAGCCTCCTATTCTCGGATGTGCATGCTCTTGTTCCTAT | |
| | CACACAGATTTTGAGGTCTGAAGGAGAAAAG | |
| | TCCGAGAATAGGAGGCT | 5115 |
| | AGCCTCCTATTCTCGGA | 5116 |
| Male-sterile | TTCTCCTTCAGACCTCAAAATCTGTGTGATAGGAACAAGAGCATG | 5117 |
| AG | CACATCCGAGAAGAGTAGGCTACACCATCCACAGTAACAGGCATC | |
| Zea mays | ATGTCGACCCTGACTTCGGCGGGGCAGCAGA | |
| Glu7Term | TCTGCTGCCCCGCCGAAGTCAGGGTCGACATGATGCCTGTTACT | 5118 |
| GAG-TAG | GTGGATGGTGTAGCCTACTCTTCTCGGATGTGCATGCTCTTGTTC | |
| | CTATCACACAGATTTTGAGGTCTGAAGGAGAA | |
| | GAGAAGAGTAGGCTACA | 5119 |
| | TGTAGCCTACTCTTCTC | 5120 |
| Male-sterile | GCTGGGTCAGGATCGTCGGCGGCGGTGGCGGCGGGGAGCAGC | 5121 |
| AG | GAGAAGATGGGGAGGGGGTAGATCGAGATAAAGCGGATCGAGAA | |
| Oryza sativa | CACGACGAACCGGCAGGTGACCTTCTGCAAGCGCC | |
| Lys5Term | GGCGCTTGCAGAAGGTCACCTGCCGGTTCGTCGTGTTCTCGATC | 5122 |
| AAG-TAG | CGCTTTATCTCGATCTACCCCCTCCCCATCTTCTCGCTGCTCCCC | |
| | GCCGCCACCGCCGCCGACGATCCTGACCCAGC | |
| | GGAGGGGGTAGATCGAG | 5123 |
| | CTCGATCTACCCCCTCC | 5124 |
| Male-sterile | TCAGGATCGTCGGCGGCGGTGGCGGCGGGGAGCAGCGAGAAGA | 5125 |
| AG | TGGGGAGGGGGAAGATCTAGATAAAGCGGATCGAGAACACGACG | |
| Oryza sativa | AACCGGCAGGTGACCTTCTGCAAGCGCCGCAATG | |
| Glu7Term | CATTGCGGCGCTTGCAGAAGGTCACCTGCCGGTTCGTCGTGTTCT | 5126 |
| GAG-TAG | CGATCCGCTTTATCTAGATCTTCCCCCTCCCCATCTTCTCGCTGCT | |
| | CCCCGCCGCCACCGCCGCCGACGATCCTGA | |
| | GGAAGATCTAGATAAAG | 5127 |
| | CTTTATCTAGATCTTCC | 5128 |
| Male-sterile | TCGTCGGCGGCGGTGGCGGCGGGGAGCAGCGAGAAGATGGGG | 5129 |
| AG | AGGGGGAAGATCGAGATATAGCGGATCGAGAACACGACGAACCG | |
| Oryza sativa | GCAGGTGACCTTCTGCAAGCGCCGCAATGGCCTCC | |
| Lys9Term | GGAGGCCATTGCGGCGCTTGCAGAAGGTCACCTGCCGGTTCGTC | 5130 |
| AAG-TAG | GTGTTCTCGATCCGCTATATCTCGATCTTCCCCCTCCCCATCTTCT | |
| | CGCTGCTCCCCGCCGCCACCGCCGCCGACGA | |
| | TCGAGATATAGCGGATC | 5131 |
| | GATCCGCTATATCTCGA | 5132 |
| Male-sterile | GCGGTGGCGGCGGGGAGCAGCGAGAAGATGGGGAGGGGGAAG | 5133 |
| AG | ATCGAGATAAAGCGGATCTAGAACACGACGAACCGGCAGGTGAC | |
| Oryza sativa | CTTCTGCAAGCGCCGCAATGGCCTCCTGAAGAAGG | |
| Glu12Term | CCTTCTTCAGGAGGCCATTGCGGCGCTTGCAGAAGGTCACCTGC | 5134 |
| GAG-TAG | CGGTTCGTCGTGTTCTAGATCCGCTTTATCTCGATCTTCCCCCTCC | |
| | CCATCTTCTCGCTGCTCCCCGCCGCCACCGC | |
| | AGCGGATCTAGAACACG | 5135 |
| | CGTGTTCTAGATCCGCT | 5136 |

[0256] TABLE 34
Oligonucleotides to produce male-sterile plants

| Phenotype, Gene, | | |
|---|---|---|
| Plant & Targeted | | SEQ ID |
| Alteration | Altering Oligos | NO: |
| Male-sterile | GGGAAGAGGGAAAATAGAAATAAAAAGAATAGAGAACTCAAGCAA | 5137 |
| PI | TAGACAAGTTACATAGTCAAAGAGAAGAAATGGTATCATCAAAAAA | |
| Cucumis sativus | GCCAAAGAAATTACTGTTCTTTGCGATGCT | |
| Tyr21 Term | AGCATCGCAAAGAACAGTAATTTCTTTGGCTTTTTTGATGATACCAT | 5138 |
| TAT-TAG | TTCTTCTCTTTGACTATGTAACTTGTCTATTGCTTGAGTTCTCTATTC | |
| | TTTTTATTTCTATTTTCCCTCTTCCC | |
| | GTTACATAGTCAAAGAG | 5139 |
| | CTCTTTGACTATGTAAC | 5140 |
| Male-sterile | GAAGAGGGAAAATAGAAATAAAAAGAATAGAGAACTCAAGCAATA | 5141 |
| PI | GACAAGTTACATATTGAAAGAGAAGAAATGGTATCATCAAAAAAGC | |
| Cucumis sativus | CAAAGAAATTACTGTTCTTTGCGATGCTCA | |
| Ser22Term | TGAGCATCGCAAAGAACAGTAATTTCTTTGGCTTTTTTGATGATAC | 5142 |
| TCA-TGA | CATTTCTTCTCTTTCAATATGTAACTTGTCTATTGCTTGAGTTCTCTA | |
| | TTCTTTTTATTTCTATTTTCCCTCTTC | |
| | TACATATTGAAAGAGAA | 5143 |
| | TTCTCTTTCAATATGTA | 5144 |
| Male-sterile | AGAGGGAAAATAGAAATAAAAAGAATAGAGAACTCAAGCAATAGAC | 5145 |
| PI | AAGTTACATATTCATAGAGAAGAAATGGTATCATCAAAAAAGCCAA | |
| Cucumis sativus | AGAAATTACTGTTCTTTGCGATGCTCAAG | |
| Lys23Term | CTTGAGCATCGCAAAGAACAGTAATTTCTTTGGCTTTTTTGATGATA | 5146 |
| AAG-TAG | CCATTTCTTCTCTATGAATATGTAACTTGTCTATTGCTTGAGTTCTC | |
| | TATTCTTTTTATTTCTATTTTCCCTCT | |
| | CATATTCATAGAGAAGA | 5147 |
| | TCTTCTCTATGAATATG | 5148 |
| Male-sterile | GGGAAAATAGAAATAAAAAGAATAGAGAACTCAAGCAATAGACAAG | 5149 |
| PI | TTACATATTCAAAGTGAAGAAATGGTATCATCAAAAAAGCCAAAGA | |
| Cucumis sativus | AATTACTGTTCTTTGCGATGCTCAAGTTT | |
| Arg24Term | AAACTTGAGCATCGCAAAGAACAGTAATTTCTTTGGCTTTTTTGATG | 5150 |
| AGA-TGA | ATACCATTTCTTCACTTTGAATATGTAACTTGTCTATTGCTTGAGTT | |
| | CTCTATTCTTTTTATTTCTATTTTCCC | |
| | ATTCAAAGTGAAGAAAT | 5151 |
| | ATTTCTTCACTTTGAAT | 5152 |
| Male-sterile | GGGACGTGGGAAGGTTGAGATCAAGAGGATTGAGAACTCAAGTAA | 5153 |
| PI | CAGGCAGGTGACCTAGTCCAAGAGGAGGAATGGGATTATCAAGAA | |
| Malus domestica | GGCAAAGGAGATCACTGTTCTATGTGATGCT | |
| Tyr21Term | AGCATCACATAGAACAGTGATCTCCTTTGCCTTCTTGATAATCCCA | 5154 |
| TAG-TAG | TTCCTCCTCTTGGACTAGGTCACCTGCCTGTTACTTGAGTTCTCAA | |
| | TCCTCTTGATCTCAACCTTCCCACGTCCC | |
| | GTGACCTAGTCCAAGAG | 5155 |
| | CTCTTGGACTAGGTCAC | 5156 |
| Male-sterile | CGTGGGAAGGTTGAGATCAAGAGGATTGAGAACTCAAGTAACAGG | 5157 |
| PI | CAGGTGACCTACTCCTAGAGGAGGAATGGGATTATCAAGAAGGCA | |
| Malus domestica | AAGGAGATCACTGTTCTATGTGATGCTAAAG | |
| Lys23Term | CTTTAGCATCACATAGAACAGTGATCTCCTTTGCCTTCTTGATAATC | 5158 |
| AAG-TAG | CCATTCCTCCTCTAGGAGTAGGTCACCTGCCTGTTACTTGAGTTCT | |
| | CAATCCTCTTGATCTCAACCTTCCCACG | |
| | CCTACTCCTAGAGGAGG | 5159 |
| | CCTCCTCTAGGAGTAGG | 5160 |
| Male-sterile | AGGATTGAGAACTCAAGTAACAGGCAGGTGACCTACTCCAAGAGG | 5161 |
| PI | AGGAATGGGATTATCTAGAAGGCAAAGGAGATCACTGTTCTATGT | |
| Malus domestica | GATGCTAAAGTATCTCTTATCATTTATTCTA | |
| Lys30Term | TAGAATAAATGATAAGAGATACTTTAGCATCACATAGAACAGTGAT | 5162 |
| AAG-TAG | CTCCTTTGCCTTCTAGATAATCCCATTCCTCCTCTTGGAGTAGGTC | |
| | ACCTGCCTGTTACTTGAGTTCTCAATCCT | |
| | GGATTATCTAGAAGGCA | 5163 |
| | TGCCTTCTAGATAATCC | 5164 |
| Male-sterile | ATTGAGAACTCAAGTAACAGGCAGGTGACCTACTCCAAGAGGAGG | 5165 |
| PI | AATGGGATTATCAAGTAGGCAAAGGAGATCACTGTTCTATGTGATG | |
| Malus domestica | CTAAAGTATCTCTTATCATTTATTCTAGCT | |
| Lys31Term | AGCTAGAATAAATGATAAGAGATACTTTAGCATCACATAGAACAGT | 5166 |
| AAG-TAG | GATCTCCTTTGCCTACTTGATAATCCCATTCCTCCTCTTGGAGTAG | |
| | GTCACCTGCCTGTTACTTGAGTTCTCAAT | |
| | TTATCAAGTAGGCAAAG | 5167 |
| | CTTTGCCTACTTGATAA | 5168 |
| Male-sterile | CATTTTTACAATAGTTATCTGCAAACAAAAACAAGAGAGAAAAACAA | 5169 |
| globosa | AAACAAAAAAATGTGAAGAGGAAAAATTGAGATCAAAAGAATTGAG | |
| Antirrhinum majus | AACTCAAGCAACAGGCAGGTTACTTACT | |
| Gly2Term | AGTAAGTAACCTGCCTGTTGCTTGAGTTCTCAATTCTTTTGATCTCA | 5170 |
| GGA-TGA | ATTTTTCCTCTTCACATTTTTTTGTTTTTGTTTTTCTCTCTTGTTTTTG | |
| | TTTGCAGATAACTATTGTAAAAATG | |
| | AAAAAATGTGAAGAGGA | 5171 |
| | TCCTCTTCAee CATTTTTT | 5172 |
| Male-sterile | TTTTACAATAGTTATCTGCAAACAAAAACAAGAGAGAAAAACAAAAA | 5173 |
| globosa | CAAAAAAATGGGATGAGGAAAAATTGAGATCAAAAGAATTGAGAAC | |
| Antirrhinum majus | TCAAGCAACAGGCAGGTTACTTACTCAA | |
| Arg3Term | TTGAGTAAGTAACCTGCCTGTTGCTTGAGTTCTCAATTCTTTTGATC | 5174 |
| AGA-TGA | TCAATTTTTCCTCATCCCATTTTTTTGTTTTTGTTTTTCTCTCTTGTTT | |
| | TTGTTTGCAGATAACTATTGTAAAA | |
| | AAATGGGATGAGGAAAA | 5175 |
| | TTTTCCTCATCCCATTT | 5176 |
| Male-sterile | TACAATAGTTATCTGCAAACAAAAACAAGAGAGAAAAACAAAAACA | 5177 |
| globosa | AAAAAATGGGAAGATGAAAAATTGAGATCAAAAGAATTGAGAACTC | |
| Antirrhinum majus | AAGCAACAGGCAGGTTACTTACTCAAAGA | |
| Gly4Term | TCTTTGAGTAAGTAACCTGCCTGTTGCTTGAGTTCTCAATTCTTTTG | 5178 |
| GGA-TGA | ATCTCAATTTTTCATCTTCCCATTTTTTTGTTTTTGTTTTTCTCTCTTG | |
| | TTTTTGTTTGCAGATAACTATTGTA | |
| | TGGGAAGATGAAAAATT | 5179 |
| | AATTTTTCATCTTCCCA | 5180 |
| Male-sterile | AATAGTTATCTGCAAACAAAAACAAGAGAGAAAAACAAAAACAAAA | 5181 |
| globosa | AAATGGGAAGAGGATAAATTGAGATCAAAAGAATTGAGAACTCAAG | |
| Antirrhinum majus | CAACAGGCAGGTTACTTACTCAAAGAGAA | |
| Lys5Term | TTCTCTTTGAGTAAGTAACCTGCCTGTTGCTTGAGTTCTCAATTCTT | 5182 |
| AAA-TAA | TTGATCTCAATTTATCCTCTTCCCATTTTTTTGTTTTTGTTTTTCTCT | |
| | CTTGTTTTTGTTTGCAGATAACTATT | |
| | GAAGAGGATAAATTGAG | 5183 |
| | CTCAATTTATCCTCTTC | 5184 |
| Male-sterile | GCTGAGCTCTTGCTGCCCTTGGATCTGTTTGGGAGTGGAGAACGC | 5185 |
| PI | AGTATGGGGCGCGGCTAGATCAAGATCAAGAGGATCGAGAACTCT | |
| Zea mays | ACCAACCGGCAGGTGACCTTCTCCAAGCGCC | |
| Lys5Term | GGCGCTTGGAGAAGGTCACCTGCCGGTTGGTAGAGTTCTCGATCC | 5186 |
| AAG-TAG | TCTTGATCTTGATCTAGCCGCGCCCCATACTGCGTTCTCCACTCCC | |
| | AAACAGATCCAAGGGCAGCAAGAGCTCAGC | |
| | GGCGCGGCTAGATCAAG | 5187 |
| | CTTGATCTAGCCGCGCC | 5188 |
| Male-sterile | CTCTTGCTGCCCTTGGATCTGTTTGGGAGTGGAGAACGCAGTATG | 5189 |
| PI | GGGCGCGGCAAGATCTAGATCAAGAGGATCGAGAACTCTACCAAC | |
| Zea mays | CGGCAGGTGACCTTCTCCAAGCGCCGGGCCG | |
| Lys7Term | CGGCCCGGCGCTTGGAGAAGGTCACCTGCCGGTTGGTAGAGTTC | 5190 |
| AAG-TAG | TCGATCCTCTTGATCTAGATCTTGCCGCGCCCCATACTGCGTTCTC | |
| | CACTCCCAAACAGATCCAAGGGCAGCAAGAG | |
| | GCAAGATCTAGATCAAG | 5191 |
| | CTTGATCTAGATCTTGC | 5192 |
| Male-sterile | CTCTTGCTGCCCTTGGATCTGTTTGGGAGTGGAGAACGCAGTATG | 5193 |
| PI | GGGCGCGGCAAGATCTAGATCAAGAGGATCGAGAACTCTACCAAC | |
| Zea mays | CGGCAGGTGACCTTCTCCAAGCGCCGGGCCG | |
| Lys9Term | CGGCCCGGCGCTTGGAGAAGGTCACCTGCCGGTTGGTAGAGTTC | 5194 |
| AAG-TAG | TCGATCCTCTTGATCTAGATCTTGCCGCGCCCCATACTGCGTTCTC | |
| | CACTCCCAAACAGATCCAAGGGCAGCAAGAG | |
| | GCAAGATCTAGATCAAG | 5195 |
| | CTTGATCTAGATCTTGC | 5196 |
| Male-sterile | GATCTGTTTGGGAGTGGAGAACGCAGTATGGGGCGCGGCAAGAT | 5197 |
| PI | CAAGATCAAGAGGATCTAGAACTCTACCAACCGGCAGGTGACCTT | |
| Zea mays | CTCCAAGCGCCGGGCCGGACTGGTCAAGAAGG | |
| Glu12Term | CCTTCTTGACCAGTCCGGCCCGGCGCTTGGAGAAGGTCACCTGC | 5198 |
| GAG-TAG | CGGTTGGTAGAGTTCTAGATCCTCTTGATCTTGATCTTGCCGCGCC | |
| | CCATACTGCGTTCTCCACTCCCAAACAGATC | |
| | AGAGGATCTAGAACTCT | 5199 |
| | AGAGTTCTAGATCCTCT | 5200 |
| Male-sterile | GCTGAGCTCTTGCTGCCCTTGAATCTGTTAGGGAGTGGAGAACGG | 5201 |
| PI | AGTATGGGGCGCGGCTAGATCGAGATCAAGAGGATCGAGAACTCT | |
| Zea mays | ACCAACCGGCAGGTGACCTTCTCCAAGCGCC | |
| Lys5Term | GGCGCTTGGAGAAGGTCACCTGCCGGTTGGTAGAGTTCTCGATCC | 5202 |
| AAG-TAG | TCTTGATCTCGATCTAGCCGCGCCCCATACTCCGTTCTCCACTCCC | |
| | TAACAGATTCAAGGGCAGCAAGAGCTCAGC | |
| | GGCGCGGCTAGATCGAG | 5203 |
| | CTCGATCTAGCCGCGCC | 5204 |
| Male-sterile | CTCTTGCTGCCCTTGAATCTGTTAGGGAGTGGAGAACGGAGTATG | 5205 |
| PI | GGGCGCGGCAAGATCTAGATCAAGAGGATCGAGAACTCTACCAAC | |
| Zea mays | CGGCAGGTGACCTTCTCCAAGCGCCGGGCCG | |
| Glu7Term | CGGCCCGGCGCTTGGAGAAGGTCACCTGCCGGTTGGTAGAGTTC | 5206 |
| GAG-TAG | TCGATCCTCTTGATCTAGATCTTGCCGCGCCCCATACTCCGTTCTC | |
| | CACTCCCTAACAGATTCAAGGGCAGCAAGAG | |
| | GCAAGATCTAGATCAAG | 5207 |
| | CTTGATCTAGATCTTGC | 5208 |
| Male-sterile | CTGCCCTTGAATCTGTTAGGGAGTGGAGAACGGAGTATGGGGCG | 5209 |
| PI | CGGCAAGATCGAGATCTAGAGGATCGAGAACTCTACCAACCGGCA | |
| Zea mays | GGTGACCTTCTCCAAGCGCCGGGCCGGACTGG | |
| Lys9Term | CCAGTCCGGCCCGGCGCTTGGAGAAGGTCACCTGCCGGTTGGTA | 5210 |
| AAG-TAG | GAGTTCTCGATCCTCTAGATCTCGATCTTGCCGCGCCCCATACTC | |
| | CGTTCTCCACTCCCTAACAGATTCAAGGGCAG | |
| | TCGAGATCTAGAGGATC | 5211 |
| | GATCCTCTAGATCTCGA | 5212 |
| Male-sterile | AATCTGTTAGGGAGTGGAGAACGGAGTATGGGGCGCGGCAAGAT | 5213 |
| PI | CGAGATCAAGAGGATCTAGAACTCTACCAACCGGCAGGTGACCTT | |
| Zea mays | CTCCAAGCGCCGGGCCGGACTGGTCAAGAAGG | |
| Glu12Term | CCTTCTTGACCAGTCCGGCCCGGCGCTTGGAGAAGGTCACCTGC | 5214 |
| GAG-TAG | CGGTTGGTAGAGTTCTAGATCCTCTTGATCTCGATCTTGCCGCGC | |
| | CCCATACTCCGTTCTCCACTCCCTAACAGATT | |
| | AGAGGATCTAGAACTCT | 5215 |
| | AGAGTTCTAGATCCTCT | 5216 |
| Male-sterile | TTGCTGCTAAGCTAGCTGGAGGAAGGAGGAGGAGGAGGAGGAG | 5217 |
| PI | CGGGATGGGGCGCGGGTAGATCGAGATCAAGAGGATCGAGAACT | |
| Oryza sativa | CCACCAACCGCCAGGTGACCTTCTCCAAGCGCA | |
| Lys5Term | TGCGCTTGGAGAAGGTCACCTGGCGGTTGGTGGAGTTCTCGATCC | 5218 |
| AAG-TAG | TCTTGATCTCGATCTACCCGCGCCCCATCCCGCCTCCTCCTCCTC | |
| | CTCCTCCTTCCTCCAGCTAGCTTAGCAGCAA | |
| | GGCGCGGGTAGATCGAG | 5219 |
| | CTCGATCTACCCGCGCC | 5220 |
| Male-sterile | CTAAGCTAGCTGGAGGAAGGAGGAGGAGGAGGAGGAGGCGGGA | 5221 |
| PI | TGGGGCGCGGGAAGATCTAGATCAAGAGGATCGAGAACTCCACC | |
| Oryza sativa | AACCGCCAGGTGACCTTCTCCAAGCGCAGGAGCG | |
| Glu7Term | CGCTCCTGCGCTTGGAGAAGGTCACCTGGCGGTTGGTGGAGTTCT | 5222 |
| GAG-TAG | CGATCCTCTTGATCTAGATCTTCCCGCGCCCCATCCCGCCTCCTC | |
| | CTCCTCCTCCTCCTTCCTCCAGCTAGCTTAG | |
| | GGAAGATCTAGATCAAG | 5223 |
| | CTTGATCTAGATCTTCC | 5224 |
| Male-sterile | TAGCTGGAGGAAGGAGGAGGAGGAGGAGGAGGCGGGATGGGGC | 5225 |
| PI | GCGGGAAGATCGAGATCTAGAGGATCGAGAACTCCACCAACCGC | |
| Oryza sativa | CAGGTGACCTTCTCCAAGCGCAGGAGCGGGATCC | |
| Lys9Term | GGATCCCGCTCCTGCGCTTGGAGAAGGTCACCTGGCGGTTGGTG | 5226 |
| AAG-TAG | GAGTTCTCGATCCTCTAGATCTCGATCTTCCCGCGCCCCATCCCG | |
| | CCTCCTCCTCCTCCTCCTCCTTCCTCCAGCTA | |
| | TCGAGATCTAGAGGATC | 5227 |
| | GATCCTCTAGATCTCGA | 5228 |
| Male-sterile | GAAGGAGGAGGAGGAGGAGGAGGCGGGATGGGGCGCGGGAAG | 5229 |
| PI | ATCGAGATCAAGAGGATCTAGAACTCCACCAACCGCCAGGTGACC | |
| Oryza sativa | TTCTCCAAGCGCAGGAGCGGGATCCTCAAGAAGG | |
| Glu12Term | CCTTCTTGAGGATCCCGCTCCTGCGCTTGGAGAAGGTCACCTGGC | 5230 |
| GAG-TAG | GGTTGGTGGAGTTCTAGATCCTCTTGATCTCGATCTTCCCGCGCC | |
| | CCATCCCGCCTCCTCCTCCTCCTCCTCCTTC | |
| | AGAGGATCTAGAACTCC | 5231 |
| | GGAGTTCTAGATCCTCT | 5232 |

### EXAMPLE 28

### Engineering Plants for Abiotic Stress Tolerance

[0257] Environmental stresses, such as drought, increased soil salinity, soil contamination with heavy metals, and extreme temperature, are major factors limiting plant growth and productivity. The worldwide loss in yield of three major cereal crops, rice, maize, and wheat due to water stress (drought) has been estimated to be over ten billion dollars annually and many currently marginal soils could be brought into cultivation if suitable plant varieties were available.

[0258] Physiological and biochemical responses to high levels of ionic or nonionic solutes and decreased water potential have been studied in a variety of plants. It is known, for example, that increasing levels of alcohol dehydrogenase can confer enhances flooding resistance in plants. There are also several possible mechanisms to enhance plant salt tolerance. For example, one mechanism underlying the adaptation or tolerance of plants to osmotic stresses is the accumulation of compatible, low molecular weight osmolytes such as sugar alcohols, special amino acids, and glycinebetaine. Such accumulation can be engineered, for example, by removing feedback inhibition on 1-pyrroline-t-carboxylate synthetase, which results in accumulation of proline. Additionally, recent experiments suggest that altering the expression or activity of specific sodium or potassium transporters can confer enhanced salt tolerance.

[0259] Plant tolerance of contamination by heavy metals such as lead and aluminum in soils has also been investigated and one mechanism underlying tolerance is the production of dicarboxylic acids such as oxalate and citrate. In addition, individual genes involved in heavy metal sensitivity have been identified.

[0260] The attached tables disclose exemplary oligonucleotide base sequences which can be used to generate site-specific mutations that confer stress tolerance in plants.

TABLE 35
Genome-Altering Oligos Conferring Stress Tolerance

| Phenotype, Gene, | | |
|---|---|---|
| Plant & Targeted | | SEQ ID |
| Alteration | Altering Oligos | NO: |
| Salt Tolerance | CGTCTTTTTGTGTGGTAGTTGGATGTGACGGTTGCTCAAATGCTT | 5233 |
| P5CS | GTGACCGATAGCAGTGCTAGAGATAAGGATTTCAGGAAGCAACTT | |
| Arabidopsis thaliana | AGTGAAACTGTCAAAGCGATGCTGAGGATGA | |
| Phe128Ala | TCATCCTCAGCATCGCTTTGACAGTTTCACTAAGTTGCTTCCTGAA | 5234 |
| TTT-GCT | ATCCTTATCTCTAGCACTGCTATCGGTCACAAGCATTTGAGCAACC | |
| | GTCACATCCAACTACCACACAAAAAGACG | |
| | ATAGCAGTGCTAGAGAT | 5235 |
| | ATCTCTAGCACTGCTAT | 5236 |
| Salt Tolerance | GAGACTATGTTTGACCAGCTGGATGTGACGGCTGCTCAGCTGCTG | 5237 |
| P5CS 1 | GTGAATGACAGTAGTGCCAGAGACAAGGAGTTCAGGAAGCAACTT | |
| Brassica napus | AATGAGACAGTGAAGTCCATGCTTGATTTGA | |
| Phe128Ala | TCAAATCAAGCATGGACTTCACTGTCTCATTAAGTTGCTTCCTGAA | 5238 |
| TTC-GCC | CTCCTTGTCTCTGGCACTACTGTCATTCACCAGCAGCTGAGCAGC | |
| | CGTCACATCCAGCTGGTCAAACATAGTCTC | |
| | ACAGTAGTGCCAGAGAC | 5239 |
| | GTCTCTGGCACTACTGT | 5240 |
| Salt Tolerance | GAGACTATGTTTGACCAGATGGATGTGACGGTGGCTCAAATGCTG | 5241 |
| P5CS 2 | GTGACTGATAGCAGTGTCAGAGATAAGGATTTCAGGAAGCAACTT | |
| Brassica napus | AGTGAGACAGTCAAAGCTATGCTGAAAATGA | |
| Phe129Ala | TCATTTTCAGCATAGCTTTGACTGTCTCACTAAGTTGCTTCCTGAA | 5242 |
| TTC-GCC | ATCCTTATCTCTGACACTGCTATCAGTCACCAGCATTTGAGCCACC | |
| | GTCACATCCATCTGGTCAAACATAGTCTC | |
| | ATAGCAGTGTCAGAGAT | 5243 |
| | ATCTCTGACACTGCTAT | 5244 |
| Salt Tolerance | GATATGTTGTTTAACCAACTGGATGTCTCGTCATCTCAACTTCTTG | 5245 |
| P5CS | TCACCGACAGTGATGCTGAGAACCCAAAGTTCCGGGAGCAACTCA | |
| Oryza sativa | CTGAAACTGTTGAGTCATTATTAGATCTTA | |
| Phe128Ala | TAAGATCTAATAATGACTCAACAGTTTCAGTGAGTTGCTCCCGGAA | 5246 |
| TTT-GCT | CTTTGGGTTCTCAGCATCACTGTCGGTGACAAGAAGTTGAGATGA | |
| | CGAGACATCCAGTTGGTTAAACAACATATC | |
| | ACAGTGATGCTGAGAAC | 5247 |
| | GTTCTCAGCATCACTGT | 5248 |
| Salt Tolerance | GATATTTTGTTTAGTCAGCTGGATGTGACATCTGCTCAGCTTCTTG | 5249 |
| P5CS | TTACTGACAATGATGCTAGAGACCAAGATTTTAGAAAGCAACTTTC | |
| Medicago sativa | TGAAACTGTGAGATCACTTCTAGCACTAA | |
| Phe128Ala | TTAGTGCTAGAAGTGATCTCACAGTTTCAGAAAGTTGCTTTCTAAA | 5250 |
| TTT-GCT | ATCTTGGTCTCTAGCATCATTGTCAGTAACAAGAAGCTGAGCAGAT | |
| | GTCACATCCAGCTGACTAAACAAAATATC | |
| | ACAATGATGCTAGAGAC | 5251 |
| | GTCTCTAGCATCATTGT | 5252 |
| Salt Tolerance | GATACATTGTTTAGTCAGCTGGATGTGACATCAGCTCAGCTACTC | 5253 |
| P5CS | GTTACTGATAATGATGCTAGGGATCCAGAATTCAGGAAGCAACTT | |
| Actinidia deliciosa | ACTGAAACTGTAGAATCACTATTGAATTTGA | |
| Phe128Ala | TCAAATTCAATAGTGATTCTACAGTTTCAGTAAGTTGCTTCCTGAAT | 5254 |
| TTT-GCT | TCTGGATCCCTAGCATCATTATCAGTAACGAGTAGCTGAGCTGAT | |
| | GTCACATCCAGCTGACTAAACAATGTATC | |
| | ATAATGATGCTAGGGAT | 5255 |
| | ATCCCTAGCATCATTAT | 5256 |
| Salt Tolerance | GACACACTCTTCAGTCAACTGGATGTGACATCAGCACAGCTTCTT | 5257 |
| P5CS | GTAACAGATAATGACGCCAGAAGTCCAGAATTTAGAAAACAACTTA | |
| Cichorium intybus | CTGAAACAGTCGATTCTTTATTATCTTATA | |
| Phe122Ala | TATAAGATAATAAAGAATCGACTGTTTCAGTAAGTTGTTTTCTAAAT | 5258 |
| TTC-GCC | TCTGGACTTCTGGCGTCATTATCTGTTACAAGAAGCTGTGCTGAT | |
| | GTCACATCCAGTTGACTGAAGAGTGTGTC | |
| | ATAATGACGCCAGAAGT | 5259 |
| | ACTTCTGGCGTCATTAT | 5260 |
| Salt Tolerance | GATTCTTTGTTCAGTCAGTTGGATGTGACATCAGCTCAGCTTCTGG | 5261 |
| P5CS | TGACTGATAATGACGCTAGAGATCCAGATTTTAGGAGACAACTCA | |
| Lycopersicon | ATGACACAGTAAATTCGTTGCTTTCTCTAA | |
| esculentum | TTAGAGAAAGCAACGAATTTACTGTGTCATTGAGTTGTCTCCTAAA | 5262 |
| Phe128Ala | ATCTGGATCTCTAGCGTCATTATCAGTCACCAGAAGCTGAGCTGA | |
| TTT-GCT | TGTCACATCCAACTGACTGAACAAAGAATC | |
| | ATAATGACGCTAGAGAT | 5263 |
| | ATCTCTAGCGTCATTAT | 5264 |
| Salt Tolerance | GATACCATGTTCAGCCAGCTTGATGTGACTTCTTCCCAACTTCTTG | 5265 |
| P5CS | TGAATGATGGATTTGCTAGGGATGCTGGCTTCAGAAAACAACTTT | |
| Vigna unguiculata | CGGACACAGTGAACGCGTTATTAGATTTAA | |
| Phe162Ala | TTAAATCTAATAACGCGTTCACTGTGTCCGAAAGTTGTTTTCTGAA | 5266 |
| TTT-GCT | GCCAGCATCCCTAGCAAATCCATCATTCACAAGAAGTTGGGAAGA | |
| | AGTCACATCAAGCTGGCTGAACATGGTATC | |
| | ATGGATTTGCTAGGGAT | 5267 |
| | ATCCCTAGCAAATCCAT | 5268 |
| Salt Tolerance | GACACCTTGTTTAGTCAGTTGGATCTGACTGCTGCTCAGCTGCTT | 5269 |
| P5CS | GTGACGGACAACGACGCTAGAGATCCAAGTTTTAGAACACAACTA | |
| Mesembryanthemum | ACTGAAACAGTGTATCAGTTGTTGGATCTAA | |
| crystallinum | TTAGATCCAACAACTGATACACTGTTTCAGTTAGTTGTGTTCTAAA | 5270 |
| Phe125Ala | ACTTGGATCTCTAGCGTCGTTGTCCGTCACAAGCAGCTGAGCAGC | |
| TTT-GCT | AGTCAGATCCAACTGACTAAACAAGGTGTC | |
| | ACAACGACGCTAGAGAT | 5271 |
| | ATCTCTAGCGTCGTTGT | 5272 |
| Salt Tolerance | GACACATTATTTAGCCAGCTGGATGTGACATCAGCTCAGCTTCTT | 5273 |
| P5CS | GTGACTGATAATGATGCTAGGGATGAAGCTTTCCGAAATCAACTTA | |
| Vitis vinifera | CTCAAACAGTGGATTCATTGTTAGCTTTGA | |
| Phe130Ala | TCAAAGCTAACAATGAATCCACTGTTTGAGTAAGTTGATTTCGGAA | 5274 |
| TTT-GCT | AGCTTCATCCCTAGCATCATTATCAGTCACAAGAAGCTGAGCTGAT | |
| | GTCACATCCAGCTGGCTAAATAATGTGTC | |
| | ATAATGATGCTAGGGAT | 5275 |
| | ATCCCTAGCATCATTAT | 5276 |
| Salt Tolerance | GATACGCTGTTCACTCAGCTCGATGTGACATCGGCTCAGCTTCTT | 5277 |
| P5CS | GTGACGGATAACGATGCTCGAGATAAGGATTTCAGGAAGCAGCTT | |
| Vigna aconitifolia | ACTGAGACTGTGAAGTCGCTGTTGGCGCTGA | |
| Phe129Ala | TCAGCGCCAACAGCGACTTCACAGTCTCAGTAAGCTGCTTCCTGA | 5278 |
| TTT-GCT | AATCCTTATCTCGAGCATCGTTATCCGTCACAAGAAGCTGAGCCG | |
| | ATGTCACATCGAGCTGAGTGAACAGCGTATC | |
| | ATAACGATGCTCGAGAT | 5279 |
| | ATCTCGAGCATCGTTAT | 5280 |
| Salt Tolerance | AGAGATGTTCTTAGTTCCAAAGAAATCTCACCTCTCACTTTCTCCG | 5281 |
| HKT1 | TCTTCACAACAGTTGTCACGTTTGCAAACTGCGGATTTGTCCCCAC | |
| Arabidopsis thaliana | GAATGAGAACATGATCATCTTTCGCAAAA | |
| Ser207Val | TTTTGCGAAAGATGATCATGTTCTCATTCGTGGGGACAAATCCGC | 5282 |
| TCC-GTC | AGTTTGCAAACGTGACAACTGTTGTGAAGACGGAGAAAGTGAGAG | |
| | GTGAGATTTCTTTGGAACTAAGAACATCTCT | |
| | CAACAGTTGTCACGTTT | 5283 |
| | AAACGTGACAACTGTTG | 5284 |
| Salt Tolerance | CGAATGAGAACATGATCATCTTTCGCAAAAACTCTGGTCTCATCTG | 5285 |
| HKT1 | GCTCCTAATCCCTCTAGTACTGATGGGAAACACTTTGTTCCCTTGC | |
| Arabidopsis thaliana | TTCTTGGTTTTGCTCATATGGGGACTTTA | |
| Gln237Leu | TAAAGTCCCCATATGAGCAAAACCAAGAAGCAAGGGAACAAAGTG | 5286 |
| CAA-CTA | TTTCCCATCAGTACTAGAGGGATTAGGAGCCAGATGAGACCAGAG | |
| | TTTTTGCGAAAGATGATCATGTTCTCATTCG | |
| | AATCCCTCTAGTACTGA | 5287 |
| | TCAGTACTAGAGGGATT | 5288 |
| Salt Tolerance | AGTCTCTAGAAGGAATGAGTTCGTACGAGAAGTTGGTTGGATCGT | 5289 |
| HKT1 | TGTTTCAAGTGGTGAGTTCGCGACACACCGGAGAAACTATAGTAG | |
| Arabidopsis thaliana | ACCTCTCTACACTTTCCCCAGCTATCTTGGT | |
| Asn332Ser | ACCAAGATAGCTGGGGAAAGTGTAGAGAGGTCTACTATAGTTTCT | 5290 |
| AAT-AGT | CCGGTGTGTCGCGAACTCACCACTTGAAACAACGATCCAACCAAC | |
| | TTCTCGTACGAACTCATTCCTTCTAGAGACT | |
| | AGTGGTGAGTTCGCGAC | 5291 |
| | GTCGCGAACTCACCACT | 5292 |
| Salt Tolerance | AGAGATGTGCTAAAGAAGAAAGGTCTCAAAATGGTGACCTTTTCC | 5293 |
| HKT1 | GTCTTCACCACCGTGGTGACCTTTGCCAGTTGTGGGTTTGTCCCG | |
| Eucalyptus | ACCAATGAAAACATGATTATCTTCAGCAAAA | |
| camaldulensis | TTTTGCTGAAGATAATCATGTTTTCATTGGTCGGGACAAACCCACA | 5294 |
| Ser256Val | ACTGGCAAAGGTCACCACGGTGGTGAAGACGGAAAAGGTCACCA | |
| TCG-GTG | TTTTGAGACCTTTCTTCTTTAGCACATCTCT | |
| | CCACCGTGGTGACCTTT | 5295 |
| | AAAGGTCACCACGGTGG | 5296 |
| Salt Tolerance | CCAATGAAAACATGATTATCTTCAGCAAAAACTCTGGCCTCCTCCT | 5297 |
| HKT1 | GATTCTCATCCCTCTGGCCCTTCTTGGGAACATGCTGTTCCCATC | |
| Eucalyptus | GAGCCTACGTTTGACGCTTTGGCTCATCGG | |
| camaldulensis | CCGATGAGCCAAAGCGTCAAACGTAGGCTCGATGGGAACAGCAT | 5298 |
| Gln286Leu | GTTCCCAAGAAGGGCCAGAGGGATGAGAATCAGGAGGAGGCCA | |
| CAG-CTG | GAGTTTTTGCTGAAGATAATCATGTTTTCATTGG | |
| | CATCCCTCTpee GGCCCTTC | 5299 |
| | GAAGGGCCAGAGGGATG | 5300 |
| Salt Tolerance | AATCGTTGAATGGACTAAGCTCCTGTGAGAAAATCGTGGGCGCGC | 5301 |
| HKT1 | TGTTTCAGTGCGTGAGCAGCAGACATACCGGCGAGACGGTCGTC | |
| Eucalyptus | GATCTGTCCACAGTTGCTCCCGCCATCTTGGT | |
| camaldulensis | ACCAAGATGGCGGGAGCAACTGTGGACAGATCGACGACCGTCTC | 5302 |
| Asn381Ser | GCCGGTATGTCTGCTGCTCACGCACTGAAACAGCGCGCCCACGA | |
| AAC-AGC | TTTTCTCACAGGAGCTTAGTCCATTCAACGATT | |
| | GTGCGTGAGCAGCAGAC | 5303 |
| | GTCTGCTGCTCACGCAC | 5304 |
| Salt Tolerance | AAAGCTCCACTGAAGAAGAAAGGGATCAACATTGCACTCTTCTCA | 5305 |
| HKT1 | TTCTCGGTCACGGTCGTCTCGTTTGCGAATGTGGGGCTCGTGCC | |
| Oryza sativa | GACAAATGAGAACATGGCAATCTTCTCCAAGA | |
| Ser238Val | TCTTGGAGAAGATTGCCATGTTCTCATTTGTCGGCACGAGCCCCA | 5306 |
| TCC-GTC | CATTCGCAAACGAGACGACCGTGACCGAGAATGAGAAGAGTGCA | |
| | ATGTTGATCCCTTTCTTCTTCAGTGGAGCTTT | |
| | TCACGGTCGTCTCGTTT | 5307 |
| | AAACGAGACGACCGTGA | 5308 |
| Salt Tolerance | CAAATGAGAACATGGCAATCTTCTCCAAGAACCCGGGCCTCCTCC | 5309 |
| HKT1 | TCCTGTTCATCGGCCTGATTCTTGCAGGCAATACACTTTACCCTCT | |
| Oryza sativa | CTTCCTAAGGCTATTGATATGGTTCCTGGG | |
| Gln268Leu | CCCAGGAACCATATCAATAGCCTTAGGAAGAGAGGGTAAAGTGTA | 5310 |
| CAG-CTG | TTGCCTGCAAGAATCAGGCCGATGAACAGGAGGAGGAGGCCCGG | |
| | GTTCTTGGAGAAGATTGCCATGTTCTCATTTG | |
| | CATCGGCCTGATTCTTG | 5311 |
| | CAAGAATCAGGCCGATG | 5312 |
| Salt Tolerance | CAGTCTTTGATGGACTCAGCTCTTACCAGAAGATTATCAATGCATT | 5313 |
| HKT1 | GTTCATGGCAGTGAGCGCAAGGCACTCGGGGGAGAACTCCATCG | |
| Oryza sativa | ACTGCTCACTCATCGCCCCTGCTGTTCTAGT | |
| Asn363Ser | ACTAGAACAGCAGGGGCGATGAGTGAGCAGTCGATGGAGTTCTC | 5314 |
| AAC-AGC | CCCCGAGTGCCTTGCGCTCACTGCCATGAACAATGCATTGATAAT | |
| | CTTCTGGTAAGAGCTGAGTCCATCAAAGACTG | |
| | GGCAGTGAGCGCAAGGC | 5315 |
| | GCCTTGCGCTCACTGCC | 5316 |
| Salt Tolerance | GTGCCCCACTGAACAAGAAAGGGATCAACATCGTGCTCTTCTCAC | 5317 |
| HKT1 | TATCAGTCACCGTTGTCTCCTGTGCGAATGCAGGACTCGTGCCCA | |
| Triticum aestivum | CAAATGAGAACATGGTCATCTTCTCAAAGAA | |
| Ala240Val | TTCTTTGAGAAGATGACCATGTTCTCATTTGTGGGCACGAGTCCT | 5318 |
| GCC-GTC | GCATTCGCACAGGAGACAACGGTGACTGATAGTGAGAAGAGCAC | |
| | GATGTTGATCCCTTTCTTGTTCAGTGGGGCAC | |
| | CACCGTTGTCTCCTGTG | 5319 |
| | CACAGGAGACAACGGTG | 5320 |
| Salt Tolerance | CAAATGAGAACATGGTCATCTTCTCAAAGAATTCAGGCCTCTTGTT | 5321 |
| HKT1 | GCTGCTGAGTGGCCTGATGCTCGCAGGCAATACATTGTTCCCTCT | |
| Triticum aestivum | CTTCCTGAGGCTACTGGTGTGGTTCCTGGG | |
| Gln270Leu | CCCAGGAACCACACCAGTAGCCTCAGGAAGAGAGGGAACAATGT | 5322 |
| CAG-CTG | ATTGCCTGCGAGCATCAGGCCACTCAGCAGCAACAAGAGGCCTG | |
| | AATTCTTTGAGAAGATGACCATGTTCTCATTTG | |
| | GAGTGGCCTGATGCTCG | 5323 |
| | CGAGCATCAGGCCACTC | 5324 |
| Salt Tolerance | CAGTCTTTGATGGGCTCAGCTCTTATCAGAAGACTGTCAATGCATT | 5325 |
| HKT1 | CTTCATGGTGGTGAGTGCGAGGCACTCAGGGGAGAATTCCATCG | |
| Triticum aestivum | ACTGCTCGCTCATGTCCCCTGCCATTATAGT | |
| Asn365Ser | ACTATAATGGCAGGGGACATGAGCGAGCAGTCGATGGAATTCTCC | 5326 |
| AAT-AGT | CCTGAGTGCCTCGCACTCACCACCATGAAGAATGCATTGACAGTC | |
| | TTCTGATAAGAGCTGAGCCCATCAAAGACTG | |
| | GGTGGTGAGTGCGAGGC | 5327 |
| | GCCTCGCACTCACCACC | 5328 |
| Freezing Tolerance | TTTTTTTTGTTTTCGTTTTCAAAAACAAAATCTTTGAATTTTATGGCA | 5329 |
| proline oxidase | ACCCGTCTTCTCTGAACAAACTTTATCCGGCGATCTTACCGTTTAC | |
| precursor | CCGCTTTTAGCCCGGTGGGTCCTCCCA | |
| Arabidopsis thaliana | TGGGAGGACCCACCGGGCTAAAAGCGGGTAAACGGTAAGATCGC | 5330 |
| Arg7Term | CGGATAAAGTTTGTTCAGAGAAGACGGGTTGCCATAAAATTCAAA | |
| CGA-TGA | GATTTTGTTTTTGAAAACGAAAACAAAAAAAA | |
| | GTCTTCTCTGAACAAAC | 5331 |
| | GTTTGTTCAGAGAAGAC | 5332 |
| Freezing Tolerance | TCAAAAACAAAATCTTTGAATTTTATGGCAACCCGTCTTCTCAGAA | 5333 |
| proline oxidase | CAAACTTTATCCGGTGATCTTACCGTTTACCCGCTTTTAGCCCGGT | |
| precursor | GGGTCCTCCCACCGTGACTGCTTCCACCG | |
| Arabidopsis thaliana | CGGTGGAAGCAGTCACGGTGGGAGGACCCACCGGGCTAAAAGC | 5334 |
| Arg13Term | GGGTAAACGGTAAGATCACCGGATAAAGTTTGTTCTGAGAAGACG | |
| CGA-TGA | GGTTGCCATAAAATTCAAAGATTTTGTTTTTGA | |
| | TTATCCGGTGATCTTAC | 5335 |
| | GTAAGATCACCGGATAA | 5336 |
| Freezing Tolerance | AAAATCTTTGAATTTTATGGCAACCCGTCTTCTCCGAACAAACTTT | 5337 |
| proline oxidase | ATCCGGCGATCTTAGCGTTTACCCGCTTTTAGCCCGGTGGGTCCT | |
| precursor | CCCACCGTGACTGCTTCCACCGCCGTCGTC | |
| Arabidopsis thaliana | GACGACGGCGGTGGAAGCAGTCACGGTGGGAGGACCCACCGGG | 5338 |
| Tyr15Term | CTAAAAGCGGGTAAACGCTAAGATCGCCGGATAAAGTTTGTTCGG | |
| TAC-TAG | AGAAGACGGGTTGCCATAAAATTCAAAGATTTT | |
| | CGATCTTAGCGTTTACC | 5339 |
| | GGTAAACGCTAAGATCG | 5340 |
| Freezing Tolerance | CTTTGAATTTTATGGCAACCCGTCTTCTCCGAACAAACTTTATCCG | 5341 |
| proline oxidase | GCGATCTTACCGTTAACCCGCTTTTAGCCCGGTGGGTCCTCCCAC | |
| precursor | CGTGACTGCTTCCACCGCCGTCGTCCCGGA | |
| Arabidopsis thaliana | TCCGGGACGACGGCGGTGGAAGCAGTCACGGTGGGAGGACCCA | 5342 |
| Leu17Term | CCGGGCTAAAAGCGGGTTAACGGTAAGATCGCCGGATAAAGTTT | |
| TTA-TAA | GTTCGGAGAAGACGGGTTGCCATAAAATTCAAAG | |
| | TTACCGTTAACCCGCTT | 5343 |
| | AAGCGGGTTAACGGTAA | 5344 |
| Freezing Tolerance | CCGGTGGGTCCTCCCACCGTGACTGCTTCCACCGCCGTCGTCCC | 5345 |
| proline oxidase | GGAGATTCTCTCCTTTTGACAACAAGCACCGGAACCACCTCTTCA | |
| precursor | CCACCCAAAACCCACCGAGCAATCTCACGATG | |
| Arabidopsis thaliana | CATCGTGAGATTGCTCGGTGGGTTTTGGGTGGTGAAGAGGTGGT | 5346 |
| Gly42Term | TCCGGTGCTTGTTGTCAAAAGGAGAGAATCTCCGGGACGACGGC | |
| GGA-TGA | GGTGGAAGCAGTCACGGTGGGAGGACCCACCGG | |
| | TCTCCTTTTGACAACAA | 5347 |
| | TTGTTGTCAAAAGGAGA | 5348 |
| Lead Tolerance | ACATGAAGCAGTGAAATCTCTGTTTGTATTGAATCTTATTAGTCTC | 5349 |
| cyclic nucleotide- | AAACTATGAATTTCTGACAAGAGAAGTTTGTAAGGTCAGTGTTCCA | |
| regulated ion channel | GATTTGTCTCATTGAATTCTAAGTCGTGA | |
| Arabidopsis thaliana | TCACGACTTAGAATTCAATGAGACAAATCTGGAACACTGACCTTAC | 5350 |
| Arg4Term | AAACTTCTCTTGTCAGAAATTCATAGTTTGAGACTAATAAGATTCAA | |
| CGA-TGA | TACAAACAGAGATTTCACTGCTTCATGT | |
| | TGAATTTCTGACAAGAG | 5351 |
| | CTCTTGTCAGAAATTCA | 5352 |
| Lead Tolerance | TGAAGCAGTGAAATCTCTGTTTGTATTGAATCTTATTAGTCTCAAA | 5353 |
| cyclic nucleotide- | CTATGAATTTCCGATAAGAGAAGTTTGTAAGGTCAGTGTTCCAGAT | |
| regulated ion channel | TTGTCTCATTGAATTCTAAGTCGTGAAGC | |
| Arabidopsis thaliana | GCTTCACGACTTAGAATTCAATGAGACAAATCTGGAACACTGACCT | 5354 |
| Gln5Term | TACAAACTTCTCTTATCGGAAATTCATAGTTTGAGACTAATAAGATT | |
| CAA-TAA | CAATACAAACAGAGATTTCACTGCTTCA | |
| | ATTTCCGATAAGAGAAG | 5355 |
| | CTTCTCTTATCGGAAAT | 5356 |
| Lead Tolerance | AGCAGTGAAATCTCTGTTTGTATTGAATCTTATTAGTCTCAAACTAT | 5357 |
| cyclic nucleotide- | GAATTTCCGACAATAGAAGTTTGTAAGGTCAGTGTTCCAGATTTGT | |
| regulated ion channel | CTCATTGAATTCTAAGTCGTGAAGCTTA | |
| Arabidopsis thaliana | TAAGCTTCACGACTTAGAATTCAATGAGACAAATCTGGAACACTGA | 5358 |
| Glu6Term | CCTTACAAACTTCTATTGTCGGAAATTCATAGTTTGAGACTAATAA | |
| GAG-TAG | GATTCAATACAAACAGAGATTTCACTGCT | |
| | TCCGACAATAGAAGTTT | 5359 |
| | AAACTTCTATTGTCGGA | 5360 |
| Lead Tolerance | AGTGAAATCTCTGTTTGTATTGAATCTTATTAGTCTCAAACTATGAA | 5361 |
| cyclic nucleotide- | TTTCCGACAAGAGTAGTTTGTAAGGTCAGTGTTCCAGATTTGTCTC | |
| regulated ion channel | ATTGAATTCTAAGTCGTGAAGCTTAATT | |
| Arabidopsis thaliana | AATTAAGCTTCACGACTTAGAATTCAATGAGACAAATCTGGAACAC | 5362 |
| Lys7Term | TGACCTTACAAACTACTCTTGTCGGAAATTCATAGTTTGAGACTAA | |
| AAG-TAG | TAAGATTCAATACAAACAGAGATTTCACT | |
| | GACAAGAGTAGTTTGTA | 5363 |
| | TACAAACTACTCTTGTC | 5364 |
| Lead Tolerance | CATTGAATTCTAAGTCGTGAAGCTTAATTCGATTCTTCTTCACTTTC | 5365 |
| cyclic nucleotide- | TCGGATCAGGTTTTAAGATTGGAAGTCGGATAAGACTTCCTCCGA | |
| regulated ion channel | CGTGGAATATTCCGGTAAAAACGAGATTC | |
| Arabidopsis thaliana | GAATCTCGTTTTTACCGGAATATTCCACGTCGGAGGAAGTCTTATC | 5366 |
| Gln12Term | CGACTTCCAATCTTAAAACCTGATCCGAGAAAGTGAAGAAGAATC | |
| CAA-TAA | GAATTAAGCTTCACGACTTAGAATTCAATG | |
| | TCAGGTTTTAAGATTGG | 5367 |
| | CCAATCTTAAAACCTGA | 5368 |
| Lead Tolerance | TGGAAGTCAATCCCCCACGTTGAGCAGGTTGATGCATTGGCTAAA | 5369 |
| cyclic nucleotide- | GTTATGAATCACCGCTAAGACGAGTTTGTGAGGTTTCAGGATTGG | |
| gated calmodulin- | AAATCAGAGAGAAGCTCTGAGGGAAATTTTC | |
| binding ion channel | GAAAATTTCCCTCAGAGCTTCTCTCTGATTTCCAATCCTGAAACCT | 5370 |
| (CBP4) | CACAAACTCGTCTTAGCGGTGATTCATAACTTTAGCCAATGCATCA | |
| Nicotiana Tabacum | ACCTGCTCAACGTGGGGGATTGACTTCCA | |
| Gln5Term | ATCACCGCTAAGACGAG | 5371 |
| CAA-TAA | CTCGTCTTAGCGGTGAT | 5372 |
| Lead Tolerance | TCAATCCCCCACGTTGAGCAGGTTGATGCATTGGCTAAAGTTATG | 5373 |
| cyclic nucleotide- | AATCACCGCCAAGACTAGTTTGTGAGGTTTCAGGATTGGAAATCA | |
| gated calmodulin- | GAGAGAAGCTCTGAGGGAAATTTTCATGCTA | |
| binding ion channel | TAGCATGAAAATTTCCCTCAGAGCTTCTCTCTGATTTCCAATCCTG | 5374 |
| (CBP4) | AAACCTCACAAACTAGTCTTGGCGGTGATTCATAACTTTAGCCAAT | |
| Nicotiana Tabacum | GCATCAACCTGCTCAACGTGGGGGATTGA | |
| Gly7Term | GCCAAGACTAGTTTGTG | 5375 |
| GAG-TAG | CACAAACTAGTCTTGGC | 5376 |
| Lead Tolerance | GAGCAGGTTGATGCATTGGCTAAAGTTATGAATCACCGCCAAGAC | 5377 |
| cyclic nucleotide- | GAGTTTGTGAGGTTTTAGGATTGGAAATCAGAGAGAAGCTCTGAG | |
| gated calmodulin- | GGAAATTTTCATGCTAAAGGTGGAGTCCACC | |
| binding ion channel | GGTGGACTCCACCTTTAGCATGAAAATTTCCCTCAGAGCTTCTCTC | 5378 |
| (CBP4) | TGATTTCCAATCCTAAAACCTCACAAACTCGTCTTGGCGGTGATTC | |
| Nicotiana Tabacum | ATAACTTTAGCCAATGCATCAACCTGCTC | |
| Gln12Term | TGAGGTTTTAGGATTGG | 5379 |
| CAG-TAG | CCAATCCTAAAACCTCA | 5380 |
| Lead Tolerance | TGATGCATTGGCTAAAGTTATGAATCACCGCCAAGACGAGTTTGT | 5381 |
| cyclic nucleotide- | GAGGTTTCAGGATTGTAAATCAGAGAGAAGCTCTGAGGGAAATTT | |
| gated calmodulin- | TCATGCTAAAGGTGGAGTCCACCGAAGTAAA | |
| binding ion channel | TTTACTTCGGTGGACTCCACCTTTAGCATGAAAATTTCCCTCAGAG | 5382 |
| (CBP4) | CTTCTCTCTGATTTACAATCCTGAAACCTCACAAACTCGTCTTGGC | |
| Nicotiana Tabacum | GGTGATTCATAACTTTAGCCAATGCATCA | |
| Trp14Term | CAGGATTGTAAATCAGA | 5383 |
| TGG-TGA | TCTGATTTACAATCCTG | 5384 |
| Lead Tolerance | GATGCATTGGCTAAAGTTATGAATCACCGCCAAGACGAGTTTGTG | 5385 |
| cyclic nucleotide- | AGGTTTCAGGATTGGTAATCAGAGAGAAGCTCTGAGGGAAATTTT | |
| gated calmodulin- | CATGCTAAAGGTGGAGTCCACCGAAGTAAAG | |
| binding ion channel | CTTTACTTCGGTGGACTCCACCTTTAGCATGAAAATTTCCCTCAGA | 5386 |
| (CBP4) | GCTTCTCTCTGATTACCAATCCTGAAACCTCACAAACTCGTCTTGG | |
| Nicotiana Tabacum | CGGTGATTCATAACTTTAGCCAATGCATC | |
| Lys15Term | AGGATTGGTAATCAGAG | 5387 |
| AAA-TAA | CTCTGATTACCAATCCT | 5388 |
| Lead Tolerance | CTTGAAGAATTGATCTACCACTCTTAGCTGCTAACTGTTCGCCTGG | 5389 |
| calmodulin binding | TGGAGATAATGATGTAAAGAGAGGACAGATATGTTAGATTTCAGG | |
| transport protein | ACTGCAAATCAGAGCAATCTGTTATCTCAG | |
| Hordeum vulgare | CTGAGATAACAGATTGCTCTGATTTGCAGTCCTGAAATCTAACATA | 5390 |
| Glu2Term | TCTGTCCTCTCTTTACATCATTATCTCCACCAGGCGAACAGTTAGC | |
| GAA-TAA | AGCTAAGAGTGGTAGATCAATTCTTCAAG | |
| | TAATGATGTAAAGAGAG | 5391 |
| | CTCTCTTTACATCATTA | 5392 |
| Lead Tolerance | GAAGAATTGATCTACCACTCTTAGCTGCTAACTGTTCGCCTGGTG | 5393 |
| calmodulin binding | GAGATAATGATGGAATGAGAGGACAGATATGTTAGATTTCAGGAC | |
| transport protein | TGCAAATCAGAGCAATCTGTTATCTCAGAGA | |
| Hordeum vulgare | TCTCTGAGATAACAGATTGCTCTGATTTGCAGTCCTGAAATCTAAC | 5394 |
| Arg3Term | ATATCTGTCCTCTCATTCCATCATTATCTCCACCAGGCGAACAGTT | |
| AGA-TGA | AGCAGCTAAGAGTGGTAGATCAATTCTTC | |
| | TGATGGAATGAGAGGAC | 5395 |
| | GTCCTCTCATTCCATCA | 5396 |
| Lead Tolerance | GAATTGATCTACCACTCTTAGCTGCTAACTGTTCGCCTGGTGGAG | 5397 |
| calmodulin binding | ATAATGATGGAAAGATAGGACAGATATGTTAGATTTCAGGACTGC | |
| transport protein | AAATCAGAGCAATCTGTTATCTCAGAGAACG | |
| Hordeum vulgare | CGTTCTCTGAGATAACAGATTGCTCTGATTTGCAGTCCTGAAATCT | 5398 |
| Glu4Term | AACATATCTGTCCTATCTTTCCATCATTATCTCCACCAGGCGAACA | |
| GAG-TAG | GTTAGCAGCTAAGAGTGGTAGATCAATTC | |
| | TGGAAAGATAGGACAGA | 5399 |
| | TCTGTCCTATCTTTCCA | 5400 |
| Lead Tolerance | ATCTACCACTCTTAGCTGCTAACTGTTCGCCTGGTGGAGATAATG | 5401 |
| calmodulin binding | ATGGAAAGAGAGGACTGATATGTTAGATTTCAGGACTGCAAATCA | |
| transport protein | GAGCAATCTGTTATCTCAGAGAACGCAGTTT | |
| Hordeum vulgare | AAACTGCGTTCTCTGAGATAACAGATTGCTCTGATTTGCAGTCCTG | 5402 |
| Arg6Term | AAATCTAACATATCAGTCCTCTCTTTCCATCATTATCTCCACCAGG | |
| AGA-TGA | CGAACAGTTAGCAGCTAAGAGTGGTAGAT | |
| | GAGAGGACTGATATGTT | 5403 |
| | AACATATCAGTCCTCTC | 5404 |
| Lead Tolerance | CCACTCTTAGCTGCTAACTGTTCGCCTGGTGGAGATAATGATGGA | 5405 |
| calmodulin binding | AAGAGAGGACAGATAGGTTAGATTTCAGGACTGCAAATCAGAGCA | |
| transport protein | ATCTGTTATCTCAGAGAACGCAGTTTCACCA | |
| Hordeum vulgare | TGGTGAAACTGCGTTCTCTGAGATAACAGATTGCTCTGATTTGCA | 5406 |
| Tyr7Term | GTCCTGAAATCTAACCTATCTGTCCTCTCTTTCCATCATTATCTCCA | |
| TAT-TAG | CCAGGCGAACAGTTAGCAGCTAAGAGTGG | |
| | GACAGATAGGTTAGATT | 5407 |
| | AATCTAACCTATCTGTC | 5408 |
| 2,4-DB resistance | ATCCTTCTCTGAGAAAAAACAACAGATCCGAATTTTATCTTTAATCA | 5409 |
| 3-ketoacyl-CoA | GCCGGAAAAAATGTAGAAAGCGATCGAGAGACAACGCGTTCTTCT | |
| thiolase | TGAGCATCTCCGACCTTCTTCTTCTTCTT | |
| Arabidopsis thaliana | AAGAAGAAGAAGAAGGTCGGAGATGCTCAAGAAGAACGCGTTGT | 5410 |
| Glu2Term | CTCTCGATCGCTTTCTACATTTTTTCCGGCTGATTAAAGATAAAATT | |
| GAG-TAG | CGGATCTGTTGTTTTTTCTCAGAGAAGGAT | |
| | AAAAAATGTAGAAAGCG | 5411 |
| | CGCTTTCTACATTTTTT | 5412 |
| 2,4-DB resistance | CTTCTCTGAGAAAAAACAACAGATCCGAATTTTATCTTTAATCAGC | 5413 |
| 3-ketoacyl-CoA | CGGAAAAAATGGAGTAAGCGATCGAGAGACAACGCGTTCTTCTTG | |
| thiolase | AGCATCTCCGACCTTCTTCTTCTTCTTCGC | |
| Arabidopsis thaliana | GCGAAGAAGAAGAAGAAGGTCGGAGATGCTCAAGAAGAACGCGT | 5414 |
| Lys3Term | TGTCTCTCGATCGCTTACTCCATTTTTTCCGGCTGATTAAAGATAA | |
| AAA-TAA | AATTCGGATCTGTTGTTTTTTCTCAGAGAAG | |
| | AAATGGAGTAAGCGATC | 5415 |
| | GATCGCTTACTCCATTT | 5416 |
| 2,4-DB resistance | GAAAAAACAACAGATCCGAATTTTATCTTTAATCAGCCGGAAAAAA | 5417 |
| 3-ketoacyl-CoA | TGGAGAAAGCGATCTAGAGACAACGCGTTCTTCTTGAGCATCTCC | |
| thiolase | GACCTTCTTCTTCTTCTTCGCACAATTACG | |
| Arabidopsis thaliana | CGTAATTGTGCGAAGAAGAAGAAGAAGGTCGGAGATGCTCAAGA | 5418 |
| Glu6Term | AGAACGCGTTGTCTCTAGATCGCTTTCTCCATTTTTTCCGGCTGAT | |
| GAG-TAG | TAAAGATAAAATTCGGATCTGTTGTTTTTTC | |
| | AAGCGATCTAGAGACAA | 5419 |
| | TTGTCTCTAGATCGCTT | 5420 |
| 2,4-DB resistance | AAAACAACAGATCCGAATTTTATCTTTAATCAGCCGGAAAAAATGG | 5421 |
| 3-ketoacyl-CoA | AGAAAGCGATCGAGTGACAACGCGTTCTTCTTGAGCATCTCCGAC | |
| thiolase | CTTCTTCTTCTTCTTCGCACAATTACGAGG | |
| Arabidopsis thaliana | CCTCGTAATTGTGCGAAGAAGAAGAAGAAGGTCGGAGATGCTCAA | 5422 |
| Arg7Term | GAAGAACGCGTTGTCACTCGATCGCTTTCTCCATTTTTTCCGGCT | |
| AGA-TGA | GATTAAAGATAAAATTCGGATCTGTTGTTTT | |
| | CGATCGAGTGACAACGC | 5423 |
| | GCGTTGTCACTCGATCG | 5424 |
| 2,4-DB resistance | ACAACAGATCCGAATTTTATCTTTAATCAGCCGGAAAAAATGGAGA | 5425 |
| 3-ketoacyl-CoA | AAGCGATCGAGAGATAACGCGTTCTTCTTGAGCATCTCCGACCTT | |
| thiolase | CTTCTTCTTCTTCGCACAATTACGAGGCTT | |
| Arabidopsis thaliana | AAGCCTCGTAATTGTGCGAAGAAGAAGAAGAAGGTCGGAGATGC | 5426 |
| Gln8Term | TCAAGAAGAACGCGTTATCTCTCGATCGCTTTCTCCATTTTTTCCG | |
| CAA-TAA | GCTGATTAAAGATAAAATTCGGATCTGTTGT | |
| | TCGAGAGATAACGCGTT | 5427 |
| | AACGCGTTATCTCTCGA | 5428 |
| 2,4-DB resistance | GAGAGACAAAGAGTTCTTCTTGAACATCTCCGTCCTTCTTCTTCTT | 5429 |
| glyoxysomal beta- | CCTCTCACAGCTTTTAAGGCTCTCTCTCTGCTTCAGCTTGCTTGGC | |
| ketoacyol-thiolase | TGGGGACAGTGCTGCGTATCAGAGGACCT | |
| precursor | AGGTCCTCTGATACGCAGCACTGTCCCCAGCCAAGCAAGCTGAA | 5430 |
| Brassica napus | GCAGAGAGAGAGCCTTAAAAGCTGTGAGAGGAAGAAGAAGAAGG | |
| Glu26Term | ACGGAGATGTTCAAGAAGAACTCTTTGTCTCTC | |
| GAA-TAA | ACAGCTTTTAAGGCTCT | 5431 |
| | AGAGCCTTAAAAGCTGT | 5432 |
| 2,4-DB resistance | TTGAACATCTCCGTCCTTCTTCTTCTTCCTCTCACAGCTTTGAAGG | 5433 |
| glyoxysomal beta- | CTCTCTCTCTGCTTGAGCTTGCTTGGCTGGGGACAGTGCTGCGTA | |
| ketoacyol-thiolase | TCAGAGGACCTCTCTCTATGGAGATGATGT | |
| precursor | ACATCATCTCCATAGAGAGAGGTCCTCTGATACGCAGCACTGTCC | 5434 |
| Brassica napus | CCAGCCAAGCAAGCTCAAGCAGAGAGAGAGCCTTCAAAGCTGTG | |
| Ser32Term | AGAGGAAGAAGAAGAAGGACGGAGATGTTCAA | |
| TCA-TGA | CTCTGCTTGAGCTTGCT | 5435 |
| | AGCAAGCTCAAGCAGAG | 5436 |
| 2,4-DB resistance | TCTCCGTCCTTCTTCTTCTTCCTCTCACAGCTTTGAAGGCTCTCTC | 5437 |
| glyoxysomal beta- | TCTGCTTCAGCTTGATTGGCTGGGGACAGTGCTGCGTATCAGAG | |
| ketoacyol-thiolase | GACCTCTCTCTATGGAGATGATGTAGTCATT | |
| precursor | AATGACTACATCATCTCCATAGAGAGAGGTCCTCTGATACGCAGC | 5438 |
| Brassica napus | ACTGTCCCCAGCCAATCAAGCTGAAGCAGAGAGAGAGCCTTCAAA | |
| Cys34Term | GCTGTGAGAGGAAGAAGAAGAAGGACGGAGA | |
| TGC-TGA | TCAGCTTGATTGGCTGG | 5439 |
| | CCAGCCAATCAAGCTGA | 5440 |
| 2,4-DB resistance | TCCGTCCTTCTTCTTCTTCCTCTCACAGCTTTGAAGGCTCTCTCTC | 5441 |
| glyoxysomal beta- | TGCTTCAGCTTGCTAGGCTGGGGACAGTGCTGCGTATCAGAGGA | |
| ketoacyol-thiolase | CCTCTCTCTATGGAGATGATGTAGTCATTGT | |
| precursor | ACAATGACTACATCATCTCCATAGAGAGAGGTCCTCTGATACGCA | 5442 |
| Brassica napus | GCACTGTCCCCAGCCTAGCAAGCTGAAGCAGAGAGAGAGCCTTC | |
| Leu35Term | AAAGCTGTGAGAGGAAGAAGAAGAAGGACGGA | |
| TTG-TAG | AGCTTGCTAGGCTGGGG | 5443 |
| | CCCCAGCCTAGCAAGCT | 5444 |
| 2,4-DB resistance | TCACAGCTTTGAAGGCTCTCTCTCTGCTTCAGCTTGCTTGGCTGG | 5445 |
| glyoxysomal beta- | GGACAGTGCTGCGTAGCAGAGGACCTCTCTCTATGGAGATGATGT | |
| ketoacyol-thiolase | AGTCATTGTTGCGGCACATAGGACTGCACTA | |
| precursor | TAGTGCAGTCCTATGTGCCGCAACAATGACTACATCATCTCCATA | 5446 |
| Brassica napus | GAGAGAGGTCCTCTGCTACGCAGCACTGTCCCCAGCCAAGCAAG | |
| Tyr42Term | CTGAAGCAGAGAGAGAGCCTTCAAAGCTGTGA | |
| TAT-TAG | GCTGCGTAGCAGAGGAC | 5447 |
| | GTCCTCTGCTACGCAGC | 5448 |
| 2,4-DB resistance | CAACAGACAGCAAGTGTTGCTCCAGCATCTCCGCCCTTCTAATTC | 5449 |
| 3-ketoacyl-CoA | TTCTTCTCACAATTAGGAGTCCGCTCTTGCCGCATCAGTATGTGCT | |
| thiolase B | GCAGGGGATAGCGCCGCATATCATAGGGCT | |
| Mangifera indica | AGCCCTATGATATGCGGCGCTATCCCCTGCAGCACATACTGATGC | 5450 |
| Tyr25Term | GGCAAGAGCGGACTCCTAATTGTGAGAAGAAGAATTAGAAGGGC | |
| TAC-TAG | GGAGATGCTGGAGCAACACTTGCTGTCTGTTG | |
| | CACAATTAGGAGTCCGC | 5451 |
| | GCGGACTCCTAATTGTG | 5452 |
| 2,4-DB resistance | AACAGACAGCAAGTGTTGCTCCAGCATCTCCGCCCTTCTAATTCTT | 5453 |
| 3-ketoacyol-CoA | CTTCTCACAATTACTAGTCCGCTCTTGCCGCATCAGTATGTGCTGC | |
| thiolase B | AGGGGATAGCGCCGCATATCATAGGGCTT | |
| Magnifera indica | AAGCCCTATGATATGCGGCGCTATCCCCTGCAGCACATACTGATG | 5454 |
| Glu26Term | CGGCAAGAGCGGACTAGTAATTGTGAGAAGAAGAATTAGAAGGG | |
| GAG-TAG | CGGAGATGCTGGAGCAACACTTGCTGTCTGTT | |
| | ACAATTACTAGTCCGCT | 5455 |
| | AGCGGACTAGTAATTGT | 5456 |
| 2,4-DB resistance | TCCAGCATCTCCGCCCTTCTAATTCTTCTTCTCACAATTACGAGTC | 5457 |
| 3-ketoacy\ol-CoA | CGCTCTTGCCGCATGAGTATGTGCTGCAGGGGATAGCGCCGCAT | |
| thiolase B | ATCATAGGGCTTCTGTTTATGGAGACGATGT | |
| Mangifera indica | ACATCGTCTCCATAAACAGAAGCCCTATGATATGCGGCGCTATCC | 5458 |
| Ser32Term | CCTGCAGCACATACTCATGCGGCAAGAGCGGACTCGTAATTGTGA | |
| TCA-TGA | GAAGAAGAATTAGAAGGGCGGAGATGCTGGA | |
| | TGCCGCATGAGTATGTG | 5459 |
| | CACATACTCATGCGGCA | 5460 |
| 2,4-DB resistance | TCTCCGCCCTTCTAATTCTTCTTCTCACAATTACGAGTCCGCTCTT | 5461 |
| 3-ketoacyl-CoA | GCCGCATCAGTATGAGCTGCAGGGGATAGCGCCGCATATCATAG | |
| thiolase B | GGCTTCTGTTTATGGAGACGATGTGGTGATT | |
| Mangifera indica | AATCACCACATCGTCTCCATAAACAGAAGCCCTATGATATGCGGC | 5462 |
| Cys34Term | GCTATCCCCTGCAGCTCATACTGATGCGGCAAGAGCGGACTCGT | |
| TGT-TGA | AATTGTGAGAAGAAGAATTAGAAGGGCGGAGA | |
| | TCAGTATGAGCTGCAGG | 5463 |
| | CCTGCAGCTCATACTGA | 5464 |
| 2,4-DB resistance | TCACAATTACGAGTCCGCTCTTGCCGCATCAGTATGTGCTGCAGG | 5465 |
| 3-ketoacyl-CoA | GGATAGCGCCGCATAGCATAGGGCTTCTGTTTATGGAGACGATGT | |
| thiolase B | GGTGATTGTGGCAGCTCATCGTACTGCACTT | |
| Mangifera indica | AAGTGCAGTACGATGAGCTGCCACAATCACCACATCGTCTCCATA | 5466 |
| Tyr42Term | AACAGAAGCCCTATGCTATGCGGCGCTATCCCCTGCAGCACATAC | |
| TAT-TAG | TGATGCGGCAAGAGCGGACTCGTAATTGTGA | |
| | GCCGCATAGCATAGGGC | 5467 |
| | GCCCTATGCTATGCGGC | 5468 |
| 2,4-DB resistance | GAAGGCGATCAACAGGCAGAGCATTTTGCTACATCATCTCCGGCC | 5469 |
| 3-ketoacyl-CoA | TTCTTCTTCCGCTTAGACAAATGAATCTTCGCTCTCTGCATCGGTT | |
| thiolase | TGTGCAGCTGGGGATAGTGCTTCGTATCAA | |
| Cucumis sativus | TTGATACGAAGCACTATCCCCAGCTGCACAAACCGATGCAGAGAG | 5470 |
| Tyr22Term | CGAAGATTCATTTGTCTAAGCGGAAGAAGAAGGCCGGAGATGATG | |
| TAC-TAG | TAGCAAAATGCTCTGCCTGTTGATCGCCTTC | |
| | TCCGCTTAGACAAATGA | 5471 |
| | TCATTTGTCTAAGCGGA | 5472 |
| 2,4-DB resistance | ATCAACAGGCAGAGCATTTTGCTACATCATCTCCGGCCTTCTTCTT | 5473 |
| 3-ketoacyl-CoA | CCGCTTACACAAATTAATCTTCGCTCTCTGCATCGGTTTGTGCAGC | |
| thiolase | TGGGGATAGTGCTTCGTATCAAAGGACAT | |
| Cucumis sativus | ATGTCCTTTGATACGAAGCACTATCCCCAGCTGCACAAACCGATG | 5474 |
| Glu25Term | CAGAGAGCGAAGATTAATTTGTGTAAGCGGAAGAAGAAGGCCGG | |
| GAA-TAA | AGATGATGTAGCAAAATGCTCTGCCTGTTGAT | |
| | ACACAAATTAATCTTCG | 5475 |
| | CGAAGATTAATTTGTGT | 5476 |
| 2,4-DB resistance | GGCAGAGCATTTTGCTACATCATCTCCGGCCTTCTTCTTCCGCTTA | 5477 |
| 3-ketoacyl-CoA | CACAAATGAATCTTAGCTCTCTGCATCGGTTTGTGCAGCTGGGGA | |
| thiolase | TAGTGCTTCGTATCAAAGGACATCGGTGTT | |
| Cucumis sativus | AACACCGATGTCCTTTGATACGAAGCACTATCCCCAGCTGCACAA | 5478 |
| Ser27Term | ACCGATGCAGAGAGCTAAGATTCATTTGTGTAAGCGGAAGAAGAA | |
| TCG-TAG | GGCCGGAGATGATGTAGCAAAATGCTCTGCC | |
| | TGAATCTTAGCTCTCTG | 5479 |
| | CAGAGAGCTAAGATTCA | 5480 |
| 2,4-DB resistance | TGCTACATCATCTCCGGCCTTCTTCTTCCGCTTACACAAATGAATC | 5481 |
| 3-ketoacyl-CoA | TTCGCTCTCTGCATAGGTTTGTGCAGCTGGGGATAGTGCTTCGTA | |
| thiolase | TCAAAGGACATCGGTGTTTGGAGATGATGT | |
| Cucumis sativus | ACATCATCTCCAAACACCGATGTCCTTTGATACGAAGCACTATCCC | 5482 |
| Ser31Term | CAGCTGCACAAACCTATGCAGAGAGCGAAGATTCATTTGTGTAAG | |
| TCG-TAG | CGGAAGAAGAAGGCCGGAGATGATGTAGCA | |
| | CTCTGCATAGGTTTGTG | 5483 |
| | CACAAACCTATGCAGAG | 5484 |
| 2,4-DB resistance | TCATCTCCGGCCTTCTTCTTCCGCTTACACAAATGAATCTTCGCTC | 5485 |
| 3-ketoacyl-CoA | TCTGCATCGGTTTGAGCAGCTGGGGATAGTGCTTCGTATCAAAGG | |
| thiolase | ACATCGGTGTTTGGAGATGATGTCGTGATT | |
| Cucumis sativus | AATCACGACATCATCTCCAAACACCGATGTCCTTTGATACGAAGCA | 5486 |
| Cys33Term | CTATCCCCAGCTGCTCAAACCGATGCAGAGAGCGAAGATTCATTT | |
| TGT-TGA | GTGTAAGCGGAAGAAGAAGGCCGGAGATGA | |
| | TCGGTTTGAGCAGCTGG | 5487 |
| | CCAGCTGCTCAAACCGA | 5488 |
| 2,4-DB resistance | GAAGGCAATCAACAGGCAGAGCATTCTGCTACATCATCTCCGGCC | 5489 |
| 3-ketoacyl-CoA | TTCATCTTCGGCTTAGAGCCATGAATCTTCGCTCTCTGCATCGGTT | |
| thiolase | TGTGCAGCTGGGGATAGTGCGTCGTATCAA | |
| Cucurbita sp. | TTGATACGACGCACTATCCCCAGCTGCACAAACCGATGCAGAGAG | 5490 |
| Tyr22Term | CGAAGATTCATGGCTCTAAGCCGAAGATGAAGGCCGGAGATGAT | |
| TAT-TAG | GTAGCAGAATGCTCTGCCTGTTGATTGCCTTC | |
| | TCGGCTTAGAGCCATGA | 5491 |
| | TCATGGCTCTAAGCCGA | 5492 |
| 2,4-DB resistance | ATCAACAGGCAGAGCATTCTGCTACATCATCTCCGGCCTTCATCTT | 5493 |
| 3-ketoacyl-CoA | CGGCTTATAGCCATTAATCTTCGCTCTCTGCATCGGTTTGTGCAGC | |
| thiolase | TGGGGATAGTGCGTCGTATCAAAGAACGT | |
| Cucurbita sp. | ACGTTCTTTGATACGACGCACTATCCCCAGCTGCACAAACCGATG | 5494 |
| Glu25Term | CAGAGAGCGAAGATTAATGGCTATAAGCCGAAGATGAAGGCCGG | |
| GAA-TAA | AGATGATGTAGCAGAATGCTCTGCCTGTTGAT | |
| | ATAGCCATTAATCTTCG | 5495 |
| | CGAAGATTAATGGCTAT | 5496 |
| 2,4-DB resistance | GGCAGAGCATTCTGCTACATCATCTCCGGCCTTCATCTTCGGCTT | 5497 |
| 3-ketoacyl-CoA | ATAGCCATGAATCTTAGCTCTCTGCATCGGTTTGTGCAGCTGGGG | |
| thiolase | ATAGTGCGTCGTATCAAAGAACGTCGGTGTT | |
| Cucurbita sp. | AACACCGACGTTCTTTGATACGACGCACTATCCCCAGCTGCACAA | 5498 |
| Ser21Term | ACCGATGCAGAGAGCTAAGATTCATGGCTATAAGCCGAAGATGAA | |
| TCG-TAG | GGCCGGAGATGATGTAGCAGAATGCTCTGCC | |
| | TGAATCTTAGCTCTCTG | 5499 |
| | CAGAGAGCTAAGATTCA | 5500 |
| 2,4-DB resistance | TGCTACATCATCTCCGGCCTTCATCTTCGGCTTATAGCCATGAATC | 5501 |
| 3-ketoacyl-CoA | TTCGCTCTCTGCATAGGTTTGTGCAGCTGGGGATAGTGCGTCGTA | |
| thiolase | TCAAAGAACGTCGGTGTTTGGAGATGATGT | |
| Cucurbita sp. | ACATCATCTCCAAACACCGACGTTCTTTGATACGACGCACTATCCC | 5502 |
| Ser31Term | CAGCTGCACAAACCTATGCAGAGAGCGAAGATTCATGGCTATAAG | |
| TCG-TAG | CCGAAGATGAAGGCCGGAGATGATGTAGCA | |
| | CTCTGCATAGGTTTGTG | 5503 |
| | CACAAACCTATGCAGAG | 5504 |
| 2,4-DB resistance | TCATCTCCGGCCTTCATCTTCGGCTTATAGCCATGAATCTTCGCTC | 5505 |
| 3-ketoacyl-CoA | TCTGCATCGGTTTGAGCAGCTGGGGATAGTGCGTCGTATCAAAGA | |
| thiolase | ACGTCGGTGTTTGGAGATGATGTCGTGATA | |
| Cucurbita sp. | TATCACGACATCATCTCCAAACACCGACGTTCTTTGATACGACGCA | 5506 |
| Cys33Term | CTATCCCCAGCTGCTCAAACCGATGCAGAGAGCGAAGATTCATGG | |
| TGT-TGA | CTATAAGCCGAAGATGAAGGCCGGAGATGA | |
| | TCGGTTTGAGCAGCTGG | 5507 |
| | CCAGCTGCTCAAACCGA | 5508 |
| 2,4 DB resistance | TCATAGTCTCTTTTGCCGCTTGGATTCTTCCAAGGTTAGTGAGCTG | 5509 |
| Pex14 | CTATGGCAACTCATTAGCAAACGCAACCTCCTTCCGATTTTCCCGC | |
| Arabidopsis thaliana | TCTTGCCGATGAAAATTCCCAGATTCCAG | |
| Gln5Term | CTGGAATCTGGGAATTTTCATCGGCAAGAGCGGGAAAATCGGAA | 5510 |
| CAG-TAG | GGAGGTTGCGTTTGCTAATGAGTTGCCATAGCAGCTCACTAACCT | |
| | TGGAAGAATCCAAGCGGCAAAAGAGACTATGA | |
| | CAACTCATTAGCAAACG | 5511 |
| | CGTTTGCTAATGAGTTG | 5512 |
| 2,4 DB resistance | TAGTCTCTTTTGCCGCTTGGATTCTTCCAAGGTTAGTGAGCTGCTA | 5513 |
| Pex14 | TGGCAACTCATCAGTAAACGCAACCTCCTTCCGATTTTCCCGCTCT | |
| Arabidopsis thaliana | TGCCGATGAAAATTCCCAGATTCCAGGTT | |
| Gln6Term | AACCTGGAATCTGGGAATTTTCATCGGCAAGAGCGGGAAAATCGG | 5514 |
| CAA-TAA | AAGGAGGTTGCGTTTACTGATGAGTTGCCATAGCAGCTCACTAAC | |
| | CTTGGAAGAATCCAAGCGGCAAAAGAGACTA | |
| | CTCATCAGTAAACGCAA | 5515 |
| | TTGCGTTTACTGATGAG | 5516 |
| 2,4 DB resistance | CTTTTGCCGCTTGGATTCTTCCAAGGTTAGTGAGCTGCTATGGCA | 5517 |
| Pex14 | ACTCATCAGCAAACGTAACCTCCTTCCGATTTTCCCGCTCTTGCCG | |
| Arabidopsis thaliana | ATGAAAATTCCCAGATTCCAGGTTCAATTT | |
| Gln8Term | AAATTGAACCTGGAATCTGGGAATTTTCATCGGCAAGAGCGGGAA | 5518 |
| CAA-TAA | AATCGGAAGGAGGTTACGTTTGCTGATGAGTTGCCATAGCAGCTC | |
| | ACTAACCTTGGAAGAATCCAAGCGGCAAAAG | |
| | AGCAAACGTAACCTCCT | 5519 |
| | AGGAGGTTACGTTTGCT | 5520 |
| 2,4 DB resistance | GCTGCTATGGCAACTCATCAGCAAACGCAACCTCCTTCCGATTTT | 5521 |
| Pex14 | CCCGCTCTTGCCGATTAAAATTCCCAGATTCCAGGTTCAATTTACA | |
| Arabidopsis thaliana | CCTTCTAATCATTATTTCTTAATTTTTCTT | |
| Glu19Term | AAGAAAAATTAAGAAATAATGATTAGAAGGTGTAAATTGAACCTGG | 5522 |
| GAA-TAA | AATCTGGGAATTTTAATCGGCAAGAGCGGGAAAATCGGAAGGAG | |
| | GTTGCGTTTGCTGATGAGTTGCCATAGCAGC | |
| | TTGCCGATTAAAATTCC | 5523 |
| | GGAATTTTAATCGGCAA | 5524 |
| 2,4 DB resistance | GCAACTCATCAGCAAACGCAACCTCCTTCCGATTTTCCCGCTCTT | 5525 |
| Pex14 | GCCGATGAAAATTCCTAGATTCCAGGTTCAATTTACACCTTCTAAT | |
| Arabidopsis thaliana | CATTATTTCTTAATTTTTCTTTGGTGGATT | |
| Gln22Term | AATCCACCAAAGAAAAATTAAGAAATAATGATTAGAAGGTGTAAAT | 5526 |
| CAG-TAG | TGAACCTGGAATCTAGGAATTTTCATCGGCAAGAGCGGGAAAATC | |
| | GGAAGGAGGTTGCGTTTGCTGATGAGTTGC | |
| | AAAATTCCTAGATTCCA | 5527 |
| | TGGAATCTAGGAATTTT | 5528 |

### EXAMPLE 29

### Production of Albino Mutants for the Analysis of Photosynthetic Processes

[0261] Plant productivity is limited by resources available and the ability of plants to harness these resources. The conversion of light to chemical energy, which is then used to synthesize carbohydrates, fatty acids, sugars, amino acids and other compounds, requires a complex system which combines the light harvesting apparatus of pigments and proteins. The value of light energy to the plant can only be realized when it is efficiently converted into chemical energy by photosynthesis and fed into various biochemical processes. Significant effort has therefore been directed at studying photosynthetic processes in plants in order to improve productivity and/or the efficiency of photosynthesis. The analysis of the photosynthetic process is substantially aided by the ability to produce albino plants.

[0262] The attached table discloses exemplary oligonucleotide base sequences which can be used to generate site-specific mutations in genes involved in starch metabolism.

TABLE 36
Oligonucleotides to produce albino plants

| Phenotype, Gene, | | |
|---|---|---|
| Plant & Targeted | | SEQ ID |
| Alteration | Altering Oligos | NO: |
| White leaves | TTCTTTCCTGTGAAATTATCTGCTCAAATCTTTGGTTCCTGACGGAG | 5529 |
| Immutans | ATGGCGGCGATTTGAGGCATCTCCTCTGGTACGTTGACGATTTCA | |
| Arabidopsis thaliana | CGGCCTTTGGTTACTCTTCGACGCTCTAG | |
| Ser5Term | CTAGAGCGTCGAAGAGTAACCAAAGGCCGTGAAATCGTCAACGTA | 5530 |
| TCA-TGA | CCAGAGGAGATGCCTCAAATCGCCGCCATCTCCGTCAGGAACCAA | |
| | AGATTTGAGCAGATAATTTCACAGGAAAGAA | |
| | GGCGATTTGAGGCATCT | 5531 |
| | AGATGCCTCAAATCGCC | 5532 |
| White leaves | GCTCAAATCTTTGGTTCCTGACGGAGATGGCGGCGATTTCAGGCA | 5533 |
| Immutans | TCTCCTCTGGTACGTAGACGATTTCACGGCCTTTGGTTACTCTTCG | |
| Arabidopsis thaliana | ACGCTCTAGAGCCGCCGTTTCGTACAGCTC | |
| Leu12Term | GAGCTGTACGAAACGGCGGCTCTAGAGCGTCGAAGAGTTAACCAAA | 5534 |
| TTG-TAG | GGCCGTGAAATCGTCTACGTACCAGAGGAGATGCCTGAAATCGCC | |
| | GCCATCTCCGTCAGGAACCAAAGATTTGAGC | |
| | TGGTACGTAGACGATTT | 5535 |
| | AAATCGTCTACGTACCA | 5536 |
| White leaves | TTTGGTTCCTGACGGAGATGGCGGCGATTTCAGGCATCTCCTCTG | 5537 |
| Immutans | GTACGTTGACGATTTGACGGCCTTTGGTTACTCTTCGACGCTCTAG | |
| Arabidopsis thaliana | AGCCGCCGTTTCGTACAGCTCCTCTCACCG | |
| Ser15Term | CGGTGAGAGGAGCTGTACGAAACGGCGGCTCTAGAGCGTCGAAG | 5538 |
| TCA-TGA | AGTAACCAAAGGCCGTCAAATCGTCAACGTACCAGAGGAGATGCC | |
| | TGAAATCGCCGCCATCTCCGTCAGGAACCAAA | |
| | GACGATTTGACGGCCTT | 5539 |
| | AAGGCCGTCAAATCGTC | 5540 |
| White leaves | GCGGCGATTTCAGGCATCTCCTCTGGTACGTTGACGATTTCACGG | 5541 |
| Immutans | CCTTTGGTTACTCTTTGACGCTCTAGAGCCGCCGTTTCGTACAGCT | |
| Arabidopsis thaliana | CCTCTCACCGATTGCTTCATCATCTTCCTC | |
| Arg22Term | GAGGAAGATGATGAAGCAATCGGTGAGAGGAGCTGTACGAAACG | 5542 |
| CGA-TGA | GCGGCTCTAGAGCGTCAAAGAGTAACCAAAGGCCGTGAAATCGTC | |
| | AACGTACCAGAGGAGATGCCTGAAATCGCCGC | |
| | TTACTCTTTGACGCTCT | 5543 |
| | AGAGCGTCAAAGAGTAA | 5544 |
| White leaves | TCAGGCATCTCCTCTGGTACGTTGACGATTTCACGGCCTTTGGTTA | 5545 |
| Immutans | CTCTTCGACGCTCTTGAGCCGCCGTTTCGTACAGCTCCTCTCACC | |
| Arabidopsis thaliana | GATTGCTTCATCATCTTCCTCTCTCTTCTC | |
| Arg25Term | GAGAAGAGAGAGGAAGATGATGAAGCAATCGGTGAGAGGAGCTG | 5546 |
| AGA-TGA | TACGAAACGGCGGCTCAAGAGCGTCGAAGAGTAACCAAAGGCCG | |
| | TGAAATCGTCAACGTACCAGAGGAGATGCCTGA | |
| | GACGCTCTTGAGCCGCC | 5547 |
| | GGCGGCTCAAGAGCGTC | 5548 |
| White leaves | GATTCTTGTGGGAAGGAAGAAGGATCAAGAATGGCGATTTCGATT | 5549 |
| Immutans | TCTGCTATGAGTTTTTGAACCTCAGTTTCTTCATATTCTTGTTTTAG | |
| Lycopersicon | AGCTAGGAGTTTTGAGAAGTCATCAGTTT | |
| esculentum | AAACTGATGACTTCTCAAAACTCCTAGCTCTAAAACAAGAATATGA | 5550 |
| Gly11Term | AGAAACTGAGGTTCAAAAACTCATAGCAGAAATCGAAATCGCCATT | |
| GGA-TGA | CTTGATCCTTCTTCCTTCCCACAAGAATC | |
| | TGAGTTTTTGAACCTCA | 5551 |
| | TGAGGTTCAAAAACTCA | 5552 |
| White leaves | GTGGGAAGGAAGAAGGATCAAGAATGGCGATTTCGATTTCTGCTA | 5553 |
| Immutans | TGAGTTTTGGAACCTGAGTTTCTTCATATTCTTGTTTTAGAGCTAGG | |
| Lycopersicon | AGTTTTGAGAAGTCATCAGTTTTATGCAA | |
| esculentum | TTGCATAAAACTGATGACTTCTCAAAACTCCTAGCTCTAAAACAAG | 5554 |
| Ser13Term | AATATGAAGAAACTCAGGTTCCAAAACTCATAGCAGAAATCGAAAT | |
| TCA-TGA | CGCCATTCTTGATCCTTCTTCCTTCCCAC | |
| | TGGAACCTGAGTTTCTT | 5555 |
| | AAGAAACTCAGGTTCCA | 5556 |
| White leaves | AAGAAGGATCAAGAATGGCGATTTCGATTTCTGCTATGAGTTTTGG | 5557 |
| Immutans | AACCTCAGTTTCTTGATATTCTTGTTTTAGAGCTAGGAGTTTTGAGA | |
| Lycopersicon | AGTCATCAGTTTTATGCAATTCCCAGAA | |
| esculentum | TTCTGGGAATTGCATAAAACTGATGACTTCTCAAAACTCCTAGCTC | 5558 |
| Ser16Term | TAAAACAAGAATATCAAGAAACTGAGGTTCCAAAACTCATAGCAGA | |
| TCA-TGA | AATCGAAATCGCCATTCTTGATCCTTCTT | |
| | AGTTTCTTGATATTCTT | 5559 |
| | AAGAATATCAAGAAACT | 5560 |
| White leaves | AGGATCAAGAATGGCGATTTCGATTTCTGCTATGAGTTTTGGAACC | 5561 |
| Immutans | TCAGTTTCTTCATAGTCTTGTTTTAGAGCTAGGAGTTTTGAGAAGTC | |
| Lycopersicon | ATCAGTTTTATGCAATTCCCAGAACCCA | |
| esculentum | TGGGTTCTGGGAATTGCATAAAACTGATGACTTCTCAAAACTCCTA | 5562 |
| Tyr17Term | GCTCTAAAACAAGACTATGAAGAAACTGAGGTTCCAAAACTCATAG | |
| TAT-TAG | CAGAAATCGAAATCGCCATTCTTGATCCT | |
| | TCTTCATAGTCTTGTTT | 5563 |
| | AAACAAGACTATGAAGA | 5564 |
| White leaves | AAGAATGGCGATTTCGATTTCTGCTATGAGTTTTGGAACCTCAGTT | 5565 |
| Immutans | TCTTCATATTCTTGATTTAGAGCTAGGAGTTTTGAGAAGTCATCAGT | |
| Lycopersicon | TTTATGCAATTCCCAGAACCCATGTCGG | |
| esculentum | CCGACATGGGTTCTGGGAATTGCATAAAACTGATGACTTCTCAAAA | 5566 |
| Cys19Term | CTCCTAGCTCTAAATCAAGAATATGAAGAAACTGAGGTTCCAAAAC | |
| TGT-TGA | TCATAGCAGAAATCGAAATCGCCATTCTT | |
| | TATTCTTGATTTAGAGC | 5567 |
| | GCTCTAAATCAAGAATA | 5568 |
| White leaves | CGCGTCCGATAAAAAAATCAAGAATGGCGATTTCCATATCTGCTAT | 5569 |
| Immutans | GAGTTTTCGAACTTGAGTTTCTTCTTCATATTCAGCATTTTTGTGCA | |
| Capsicum annuum | ATTCCAAGAACCCATTTTGTTTGAATTC | |
| Ser13Term | GAATTCAAACAAAATGGGTTCTTGGAATTGCACAAAAATGCTGAAT | 5570 |
| TCA-TGA | ATGAAGAAGAAACTCAAGTTCGAAAACTCATAGCAGATATGGAAAT | |
| | CGCCATTCTTGATTTTTTTATCGGACGCG | |
| | TCGAACTTGAGTTTCTT | 5571 |
| | AAGAAACTCAAGTTCGA | 5572 |
| White leaves | AAAAATCAAGAATGGCGATTTCCATATCTGCTATGAGTTTTCGAAC | 5573 |
| Immutans | TTCAGTTTCTTCTTGATATTCAGCATTTTTGTGCAATTCCAAGAACC | |
| Capsicum annuum | CATTTTGTTTGAATTCTCTATTTTCACT | |
| Ser17Term | AGTGAAAATAGAGAATTCAAACAAAATGGGTTCTTGGAATTGCACA | 5574 |
| TCA-TGA | AAAATGCTGAATATCAAGAAGAAACTGAAGTTCGAAAACTCATAGC | |
| | AGATATGGAAATCGCCATTCTTGATTTTT | |
| | TTCTTCTTGATATTCAG | 5575 |
| | CTGAATATCAAGAAGAA | 5576 |
| White leaves | CAAGAATGGCGATTTCCATATCTGCTATGAGTTTTCGAACTTCAGT | 5577 |
| Immutans | TTCTTCTTCATATTGAGCATTTTTGTGCAATTCCAAGAACCCATTTT | |
| Capsicum annuum | GTTTGAATTCTCTATTTTCACTTAGGAA | |
| Ser19Term | TTCCTAAGTGAAAATAGAGAATTCAAACAAAATGGGTTCTTGGAAT | 5578 |
| TCA-TGA | TGCACAAAAATGCTCAATATGAAGAAGAAACTGAAGTTCGAAAACT | |
| | CATAGCAGATATGGAAATCGCCATTCTTG | |
| | TTCATATTGAGCATTTT | 5579 |
| | AAAATGCTCAATATGAA | 5580 |
| White leaves | CGATTTCCATATCTGCTATGAGTTTTCGAACTTCAGTTTCTTCTTCA | 5581 |
| Immutans | TATTCAGCATTTTAGTGCAATTCCAAGAACCCATTTTGTTTGAATTC | |
| Capsicum annuum | TCTATTTTCACTTAGGAATTCTCATAG | |
| Leu21Term | CTATGAGAATTCCTAAGTGAAAATAGAGAATTCAAACAAAATGGGT | 5582 |
| TTG-TAG | TCTTGGAATTGCACTAAAATGCTGAATATGAAGAAGAAACTGAAGT | |
| | TCGAAAACTCATAGCAGATATGGAAATCG | |
| | AGCATTTTAGTGCAATT | 5583 |
| | AATTGCACTAAAATGCT | 5584 |
| White leaves | TTCCATATCTGCTATGAGTTTTCGAACTTCAGTTTCTTCTTCATATT | 5585 |
| Immutans | CAGCATTTTTGTGAAATTCCAAGAACCCATTTTGTTTGAATTCTCTA | |
| Capsicum annuum | TTTTCACTTAGGAATTCTCATAGAACT | |
| Cys22Term | AGTTCTATGAGAATTCCTAAGTGAAAATAGAGAATTCAAACAAAAT | 5586 |
| TGC-TGA | GGGTTCTTGGAATTTCACAAAAATGCTGAATATGAAGAAGAAACTG | |
| | AAGTTCGAAAACTCATAGCAGATATGGAA | |
| | TTTTTGTGAAATTCCAA | 5587 |
| | TTGGAATTTCACAAAAA | 5588 |
| White leaves | TTCGGCACGAGGGAGAAGGAGCAGACCGAGGTGGCCGTCGAGG | 5589 |
| Immutans | AGTCCTTCCCCTTCAGGTAGACGGCTCCTCCTGACGAGCCACTGG | |
| Oryza sativa | TCACCGCCGAGGAGAGCTGGGTGGTTAAGCTCG | |
| Glu22Term | CGAGCTTAACCACCCAGCTCTCCTCGGCGGTGACCAGTGGCTCGT | 5590 |
| GAG-TAG | CAGGAGGAGCCGTCTACCTGAAGGGGAAGGACTCCTCGACGGCC | |
| | ACCTCGGTCTGCTCCTTCTCCCTCGTGCCGAA | |
| | CCTTCAGGTAGACGGCT | 5591 |
| | AGCCGTCTACCTGAAGG | 5592 |
| White leaves | GAGCAGACCGAGGTGGCCGTCGAGGAGTCCTTCCCCTTCAGGGA | 5593 |
| Immutans | GACGGCTCCTCCTGACTAGCCACTGGTCACCGCCGAGGAGAGCT | |
| Oryza sativa | GGGTGGTTAAGCTCGAGCAGTCCGTGAACATTT | |
| Glu28Term | AAATGTTCACGGACTGCTCGAGCTTAACCACCCAGCTCTCCTCGG | 5594 |
| GAG-TAG | CGGTGACCAGTGGCTAGTCAGGAGGAGCCGTCTCCCTGAAGGGG | |
| | AAGGACTCCTCGACGGCCACCTCGGTCTGCTC | |
| | CTCCTGACTAGCCACTG | 5595 |
| | CAGTGGCTAGTCAGGAG | 5596 |
| White leaves | GTCGAGGAGTCCTTCCCCTTCAGGGAGACGGCTCCTCCTGACGA | 5597 |
| Immutans | GCCACTGGTCACCGCCTAGGAGAGCTGGGTGGTTAAGCTCGAGC | |
| Oryza sativa | AGTCCGTGAACATTTTCCTCACGGAGTCAGTCA | |
| Glu34Term | TGACTGACTCCGTGAGGAAAATGTTCACGGACTGCTCGAGCTTAA | 5598 |
| GAG-TAG | CCACCCAGCTCTCCTAGGCGGTGACCAGTGGCTCGTCAGGAGGA | |
| | GCCGTCTCCCTGAAGGGGAAGGACTCCTCGAC | |
| | TCACCGCCTAGGAGAGC | 5599 |
| | GCTCTCCTAGGCGGTGA | 5600 |
| White leaves | GAGGAGTCCTTCCCCTTCAGGGAGACGGCTCCTCCTGACGAGCC | 5601 |
| Immutans | ACTGGTCACCGCCGAGTAGAGCTGGGTGGTTAAGCTCGAGCAGT | |
| Oryza sativa | CCGTGAACATTTTCCTCACGGAGTCAGTCATCA | |
| Glu35Term | TGATGACTGACTCCGTGAGGAAAATGTTCACGGACTGCTCGAGCT | 5602 |
| GAG-TAG | TAACCACCCAGCTCTACTCGGCGGTGACCAGTGGCTCGTCAGGA | |
| | GGAGCCGTCTCCCTGAAGGGGAAGGACTCCTC | |
| | CCGCCGAGTAGAGCTGG | 5603 |
| | CCAGCTCTACTCGGCGG | 5604 |
| White leaves | CTTCCCCTTCAGGGAGACGGCTCCTCCTGACGAGCCACTGGTCAC | 5605 |
| Immutans | CGCCGAGGAGAGCTGAGTGGTTAAGCTCGAGCAGTCCGTGAACA | |
| Oryza sativa | TTTTCCTCACGGAGTCAGTCATCACGATACTT | |
| Trp37Term | AAGTATCGTGATGACTGACTCCGTGAGGAAAATGTTCACGGACTG | 5606 |
| TGG-TGA | CTCGAGCTTAACCACTCAGCTCTCCTCGGCGGTGACCAGTGGCTC | |
| | GTCAGGAGGAGCCGTCTCCCTGAAGGGGAAG | |
| | GAGAGCTGAGTGGTTAA | 5607 |
| | TTAACCACTCAGCTCTC | 5608 |
| White leaves | TCCGGAGGAGGAAGGGGGATTCGACGAGGAGCTCACCCTCGCCG | 5609 |
| Immutans | GCGAGGACGGCGACTGAGTCGTCAGATTCGAGCAGTCCTTCAAC | |
| Triticum aestivum | GTATTCCTCACGGATACTGTCATCTTTATACTC | |
| Trp22Term | GAGTATAAAGATGACAGTATCCGTGAGGAATACGTTGAAGGACTG | 5610 |
| TGG-TGA | CTCGAATCTGACGACTCAGTCGCCGTCCTCGCCGGCGAGGGTGA | |
| | GCTCCTCGTCGAATCCCCCTTCCTCCTCCGGA | |
| | GGCGACTGAGTCGTCAG | 5611 |
| | CTGACGACTCAGTCGCC | 5612 |
| White leaves | GAGGAAGGGGGATTCGACGAGGAGCTCACCCTCGCCGGCGAGG | 5613 |
| Immutans | ACGGCGACTGGGTCGTCTGATTCGAGCAGTCCTTCAACGTATTCC | |
| Triticum aestivum | TCACGGATACTGTCATCTTTATACTCGATATTC | |
| Arg25Term | GAATATCGAGTATAAAGATGACAGTATCCGTGAGGAATACGTTGAA | 5614 |
| AGA-TGA | GGACTGCTCGAATCAGACGACCCAGTCGCCGTCCTCGCCGGCGA | |
| | GGGTGAGCTCCTCGTCGAATCCCCCTTCCTC | |
| | GGGTCGTCTGATTCGAG | 5615 |
| | CTCGAATCAGACGACCC | 5616 |
| White leaves | GGGGGATTCGACGAGGAGCTCACCCTCGCCGGCGAGGACGGCG | 5617 |
| Immutans | ACTGGGTCGTCAGATTCTAGCAGTCCTTCAACGTATTCCTCACGGA | |
| Triticum aestivum | TACTGTCATCTTTATACTCGATATTCTGTATC | |
| Glu27Term | GATACAGAATATCGAGTATAAAGATGACAGTATCCGTGAGGAATAC | 5618 |
| GAG-TAG | GTTGAAGGACTGCTAGAATCTGACGACCCAGTCGCCGTCCTCGCC | |
| | GGCGAGGGTGAGCTCCTCGTCGAATCCCCC | |
| | TCAGATTCTAGCAGTCC | 5619 |
| | GGACTGCTAGAATCTGA | 5620 |
| White leaves | GGATTCGACGAGGAGCTCACCCTCGCCGGCGAGGACGGCGACTG | 5621 |
| Immutans | GGTCGTCAGATTCGAGTAGTCCTTCAACGTATTCCTCACGGATACT | |
| Triticum aestivum | GTCATCTTTATACTCGATATTCTGTATCGTG | |
| Gln28Term | CACGATACAGAATATCGAGTATAAAGATGACAGTATCCGTGAGGAA | 5622 |
| CAG-TAG | TACGTTGAAGGACTACTCGAATCTGACGACCCAGTCGCCGTCCTC | |
| | GCCGGCGAGGGTGAGCTCCTCGTCGAATCC | |
| | GATTCGAGTAGTCCTTC | 5623 |
| | GAAGGACTACTCGAATC | 5624 |
| White leaves | CGAGCAGTCCTTCAACGTATTCCTCACGGATACTGTCATCTTTATA | 5625 |
| Immutans | CTCGATATTCTGTAGCGTGACCGCGACTACGCAAGGTTCTTCGTG | |
| Triticum aestivum | CTCGAGACCATCGCCAGGGTGCCCTATTTC | |
| Tyr46Term | GAAATAGGGCACCCTGGCGATGGTCTCGAGCACGAAGAACCTTG | 5626 |
| TAT-TAG | CGTAGTCGCGGTCACGCTACAGAATATCGAGTATAAAGATGACAG | |
| | TATCCGTGAGGAATACGTTGAAGGACTGCTCG | |
| | ATTCTGTAGCGTGACCG | 5627 |
| | CGGTCACGCTACAGAAT | 5628 |

### EXAMPLE 30

### Altering Amino Acid Content of Plants

[0263] Another aim of biotechnology is to generate plants, especially crop plants, with added value traits. An example of such a trait is improved nutritional quality in food crops. For example, lysine, tryptophan and threonine, which are essential amino acids in the diet of humans and many animals, are limiting nutrients in most cereal crops. Consequently, grain-based diets, such as those based on corn, barley, wheat, rice, maize, millet, sorghum, and the like, must be supplemented with more expensive synthetic amino acids or amino-acid-containing oilseed protein meals. Increasing the lysine content of these grains or of any of the feed component crops would result in significant added value.

[0264] Naturally occurring mutants of plants that have different levels of particular essential amino acids have been identified. However, these mutants are generally not the result of increased free amino acid, but are instead the result of shifts in the overall protein profile of the grain. For example, in maize, reduced levels of lysine-deficient endosperm proteins (prolamines) are complemented by elevated levels of more lysine-rich proteins (albumins, globulins and glutelins). While nutritionally superior, these mutants are associated with reduced yields and poor grain quality, limiting their agronomic usefulness.

[0265] An alternative approach is to generate plants with mutations that render key amino acid biosynthetic enzymes insensitive to feedback inhibition. Many such mutations are known and mutation results in increased free amino acid. The increased production can optionally be coupled to increased expression of an abundant storage protein comprising the chosen amino acid. Alternatively, a normally abundant protein can be engineered to contain more of the target amino acid.

[0266] The attached table discloses exemplary oligonucleotide base sequences which can be used to generate site-specific mutations that remove feedback inhibition in plant amino acid biosynthetic enzymes.

TABLE 37
Genome-Altering Oligos Conferring Amino Acid Overproduction

| Phenotype, Gene, | | |
|---|---|---|
| Plant & Targeted | | SEQ ID |
| Alteration | Altering Oligos | NO: |
| Met Overproduction | TATCCTCCAGGATCTTAAGATTTCCTCCTAATTTCGTCCGTCAGCT | 5629 |
| CGS | GAGCATTAAAGCCCATAGAAACTGTAGCAACATCGGTGTTGCACA | |
| Arabidopsis thaliana | GATCGTGGCGGCTAAGTGGTCCAACAACCC | |
| Arg77His | GGGTTGTTGGACCACTTAGCCGCCACGATCTGTGCAACACCGAT | 5630 |
| CGT-CAT | GTTGCTACAGTTTCTATGGGCTTTAATGCTCAGCTGACGGACGAA | |
| | ATTAGGAGGAAATCTTAAGATCCTGGAGGATA | |
| | TAAAGCCCATAGAAACT | 5631 |
| | AGTTTCTATGGGCTTTA | 5632 |
| Met Overproduction | TCTTAAGATTTCCTCCTAATTTCGTCCGTCAGCTGAGCATTAAAGC | 5633 |
| CGS | CCGTAGAAACTGTAACAACATCGGTGTTGCACAGATCGTGGCGG | |
| Arabidopsis thaliana | CTAAGTGGTCCAACAACCCATCCTCCGCGTT | |
| Ser81Asn | AACGCGGAGGATGGGTTGTTGGACCACTTAGCCGCCACGATCTG | 5634 |
| AGC-AAC | TGCAACACCGATGTTGTTACAGTTTCTACGGGCTTTAATGCTCAGC | |
| | TGACGGACGAAATTAGGAGGAAATCTTAAGA | |
| | AAACTGTAACAACATCG | 5635 |
| | CGATGTTGTTACAGTTT | 5636 |
| Met Overproduction | TTTCCTCCTAATTTCGTCCGTCAGCTGAGCATTAAAGCCCGTAGAA | 5637 |
| CGS | ACTGTAGCAACATCAGTGTTGCACAGATCGTGGCGGCTAAGTGGT | |
| Arabidopsis thaliana | CCAACAACCCATCCTCCGCGTTACCTTCGG | |
| Gly84Ser | CCGAAGGTAACGCGGAGGATGGGTTGTTGGACCACTTAGCCGCC | 5638 |
| GGT-AGT | ACGATCTGTGCAACACTGATGTTGCTACAGTTTCTACGGGCTTTAA | |
| | TGCTCAGCTGACGGACGAAATTAGGAGGAAA | |
| | GCAACATCAGTGTTGCA | 5639 |
| | TGCAACACTGATGTTGC | 5640 |
| Met Overproduction | TTCCTCCTAATTTCGTCCGTCAGCTGAGCATTAAAGCCCGTAGAAA | 5641 |
| CGS | CTGTAGCAACATCGATGTTGCACAGATCGTGGCGGCTAAGTGGTC | |
| Arabidopsis thaliana | CAACAACCCATCCTCCGCGTTACCTTCGGC | |
| Gly84Asp | GCCGAAGGTAACGCGGAGGATGGGTTGTTGGACCACTTAGCCGC | 5642 |
| GGT-GAT | CACGATCTGTGCAACATCGATGTTGCTACAGTTTCTACGGGCTTTA | |
| | ATGCTCAGCTGACGGACGAAATTAGGAGGAA | |
| | CAACATCGATGTTGCAC | 5643 |
| | GTGCAACATCGATGTTG | 5644 |
| Met Overproduction | TATCGTCACTCATCCTCCGCTTCCCTCCCAACTTCGTCCGCCAGC | 5645 |
| CGS | TCAGCACCAAGGCCCACCGCAACTGCAGCAACATCGGCGTCGCG | |
| Fragraria vesca | CAGATCGTCGCGGCTTCGTGGTCCAACAAAGA | |
| Arg73His | TCTTTGTTGGACCACGAAGCCGCGACGATCTGCGCGACGCCGAT | 5646 |
| CGC-CAC | GTTGCTGCAGTTGCGGTGGGCCTTGGTGCTGAGCTGGCGGACGA | |
| | AGTTGGGAGGGAAGCGGAGGATGAGTGACGATA | |
| | CAAGGCCCACCGCAACT | 5647 |
| | AGTTGCGGTGGGCCTTG | 5648 |
| Met Overproduction | TCCTCCGCTTCCCTCCCAACTTCGTCCGCCAGCTCAGCACCAAGG | 5649 |
| CGS | CCCGCCGCAACTGCAACAACATCGGCGTCGCGCAGATCGTCGCG | |
| Fragraria vesca | GCTTCGTGGTCCAACAAAGACTCCGACCTTTC | |
| Ser77Asn | GAAAGGTCGGAGTCTTTGTTGGACCACGAAGCCGCGACGATCTG | 5650 |
| AGC-AAC | CGCGACGCCGATGTTGTTGCAGTTGCGGCGGGCCTTGGTGCTGA | |
| | GCTGGCGGACGAAGTTGGGAGGGAAGCGGAGGA | |
| | CAACTGCAACAACATCG | 5651 |
| | CGATGTTGTTGCAGTTG | 5652 |
| Met Overproduction | TTCCCTCCCAACTTCGTCCGCCAGCTCAGCACCAAGGCCCGCCG | 5653 |
| CGS | CAACTGCAGCAACATCAGCGTCGCGCAGATCGTCGCGGCTTCGT | |
| Fragraria vesca | GGTCCAACAAAGACTCCGACCTTTCGGCGGTGC | |
| Gly80Ser | GCACCGCCGAAAGGTCGGAGTCTTTGTTGGACCACGAAGCCGCG | 5654 |
| GGC-AGC | ACGATCTGCGCGACGCTGATGTTGCTGCAGTTGCGGCGGGCCTT | |
| | GGTGCTGAGCTGGCGGACGAAGTTGGGAGGGAA | |
| | GCAACATCAGCGTCGCG | 5655 |
| | CGCGACGCTGATGTTGC | 5656 |
| Met Overproduction | TCCCTCCCAACTTCGTCCGCCAGCTCAGCACCAAGGCCCGCCGC | 5657 |
| CGS | AACTGCAGCAACATCGACGTCGCGCAGATCGTCGCGGCTTCGTG | |
| Fragraria vesca | TCCAACAAAGACTCCGACCTTTCGGCGGTGCC | |
| Gly80Asp | GGCACCGCCGAAAGGTCGGAGTCTTTGTTGGACCACGAAGCCGC | 5658 |
| GGC-GAC | GACGATCTGCGCGACGTCGATGTTGCTGCAGTTGCGGCGGGCCT | |
| | TGGTGCTGAGCTGGCGGACGAAGTTGGGAGGGA | |
| | CAACATCGACGTCGCGC | 5659 |
| | GCGCGACGTCGATGTTG | 5660 |
| Met Overproduction | TCTCCTCCCTCATCCTCCGCTTCCCTCCCAACTTCCAGCGCCAGC | 5661 |
| CGS | TAAGCACCAAGGCGAGCCGCAACTGCAGCAACATCGGCGTCGCG | |
| Glycine max | CAAATCGTCGCCGCTTCGTGGTCGAACAACAG | |
| Arg68His | CTGTTGTTCGACCACGAAGCGGCGACGATTTGCGCGACGCCGAT | 5662 |
| CGC-CAC | GTTGCTGCAGTTGCGGCTCGCCTTGGTGCTTAGCTGGCGCTGGA | |
| | AGTTGGGAGGGAAGCGGAGGATGAGGGAGGAGA | |
| | CCAAGGCGAGCCGCAAC | 5663 |
| | GTTGCGGCTCGCCTTGG | 5664 |
| Met Overproduction | TCCTCCGCTTCCCTCCCAACTTCCAGCGCCAGCTAAGCACCAAGG | 5665 |
| CGS | CGCGCCGCAACTGCAACAACATCGGCGTCGCGCAAATCGTCGCC | |
| Glycine max | GCTTCGTGGTCGAACAACAGCGACAACTCTCC | |
| Ser72Asn | GGAGAGTTGTCGCTGTTGTTCGACCACGAAGCGGCGACGATTTG | 5666 |
| AGC-AAC | CGCGACGCCGATGTTGTTGCAGTTGCGGCGCGCCTTGGTGCTTA | |
| | GCTGGCGCTGGAAGTTGGGAGGGAAGCGGAGGA | |
| | CAACTGCAACAACATCG | 5667 |
| | CGATGTTGTTGCAGTTG | 5668 |
| Met Overproduction | TTCCCTCCCAACTTCCAGCGCCAGCTAAGCACCAAGGCGCGCCG | 5669 |
| CGS | CAACTGCAGCAACATCAGCGTCGCGCAAATCGTCGCCGCTTCGT | |
| Glycine max | GGTCGAACAACAGCGACAACTCTCCGGCCGCCG | |
| Gly75Ser | CGGCGGCCGGAGAGTTGTCGCTGTTGTTCGACCACGAAGCGGCG | 5670 |
| GGC-AGC | ACGATTTGCGCGACGCTGATGTTGCTGCAGTTGCGGCGCGCCTT | |
| | GGTGCTTAGCTGGCGCTGGAAGTTGGGAGGGAA | |
| | GCAACATCAGCGTCGCG | 5671 |
| | CGCGACGCTGATGTTGC | 5672 |
| Met Overproduction | TCCCTCCCAACTTCCAGCGCCAGCTAAGCACCAAGGCGCGCCGC | 5673 |
| CGS | AACTGCAGCAACATCGACGTCGCGCAAATCGTCGCCGCTTCGTG | |
| Glycine max | GTCGAACAACAGCGACAACTCTCCGGCCGCCGG | |
| Gly75Asp | CCGGCGGCCGGAGAGTTGTCGCTGTTGTTCGACCACGAAGCGGC | 5674 |
| GGC-GAC | GACGATTTGCGCGACGTCGATGTTGCTGCAGTTGCGGCGCGCCT | |
| | TGGTGCTTAGCTGGCGCTGGAAGTTGGGAGGGA | |
| | CAACATCGACGTCGCGC | 5675 |
| | GCGCGACGTCGATGTTG | 5676 |
| Met Overproduction | TGTCTTCTCTGATTTTCAGGTTTCCTCCTAATTTCGTGAGGCAGCT | 5677 |
| CGS | AAGCATTAAGGCTCACAGGAATTGCAGCAATATTGGCGTGGCTCA | |
| Solanum tuberosum | AGTTGTGGCGGCTTCCTGGTCTAACAACCA | |
| Arg70His | TGGTTGTTAGACCAGGAAGCCGCCACAACTTGAGCCACGCCAATA | 5678 |
| AGG-CAC | TTGCTGCAATTCCTGTGAGCCTTAATGCTTAGCTGCCTCACGAAAT | |
| | TAGGAGGAAACCTGAAAATCAGAGAAGACA | |
| | TAAGGCTCACAGGAATT | 5679 |
| | AATTCCTGTGAGCCTTA | 5680 |
| Met Overproduction | TTTTCAGGTTTCCTCCTAATTTCGTGAGGCAGCTAAGCATTAAGGC | 5681 |
| CGS | TAGGAGGAATTGCAACAATATTGGCGTGGCTCAAGTTGTGGCGG | |
| Solanum tuberosum | CTTCCTGGTCTAACAACCAAGCCGGTCCTGA | |
| Ser74Asn | TCAGGACCGGCTTGGTTGTTAGACCAGGAAGCCGCCACAACTTG | 5682 |
| AGC-AAC | AGCCACGCCAATATTGTTGCAATTCCTCCTAGCCTTAATGCTTAGC | |
| | TGCCTCACGAAATTAGGAGGAAACCTGAAAA | |
| | GAATTGCAACAATATTG | 5683 |
| | CAATATTGTTGCAATTC | 5684 |
| Met Overproduction | TTTCCTCCTAATTTCGTGAGGCAGCTAAGCATTAAGGCTAGGAGG | 5685 |
| CGS | AATTGCAGCAATATTAGCGTGGCTCAAGTTGTGGCGGCTTCCTGG | |
| Solanum tuberosum | TCTAACAACCAAGCCGGTCCTGAATTCACTC | |
| Gly77Ser | GAGTGAATTCAGGACCGGCTTGGTTGTTAGACCAGGAAGCCGCC | 5686 |
| GGC-AGC | ACAACTTGAGCCACGCTAATATTGCTGCAATTCCTCCTAGCCTTAA | |
| | TGCTTAGCTGCCTCACGAAATTAGGAGGAAA | |
| | GCAATATTAGCGTGGCT | 5687 |
| | AGCCACGCTAATATTGC | 5688 |
| Met Overproduction | TTCCTCCTAATTTCGTGAGGCAGCTAAGCATTAAGGCTAGGAGGA | 5689 |
| CGS | ATTGCAGCAATATTGACGTGGCTCAAGTTGTGGCGGCTTCCTGGT | |
| Solanum tuberosum | CTAACAACCAAGCCGGTCCTGAATTCACTCC | |
| Gly77Asp | GGAGTGAATTCAGGACCGGCTTGGTTGTTAGACCAGGAAGCCGC | 5690 |
| GGC-GAC | CACAACTTGAGCCACGTCAATATTGCTGCAATTCCTCCTAGCCTTA | |
| | ATGCTTAGCTGCCTCACGAAATTAGGAGGAA | |
| | CAATATTGACGTGGCTC | 5691 |
| | GAGCCACGTCAATATTG | 5692 |
| Met Overproduction | CTTCCTCTCTTATCCTTCGCTTTCCTCCCAACTTTGTCCGTCAGCT | 5693 |
| CGS | CAGCACCAAGGCTCGCCACAACTGCAGCAACATTGGTGTCGCAC | |
| Mesembryanthemum | AGGTCGTCGCTGCCTCCTGGTCCAACAACTC | |
| crystallinum | GAGTTGTTGGACCAGGAGGCAGCGACGACCTGTGCGACACCAAT | 5694 |
| Arg73His | GTTGCTGCAGTTGTGGCGAGCCTTGGTGCTGAGCTGACGGACAA | |
| CGC-CAC | AGTTGGGAGGAAAGCGAAGGATAAGAGAGGAAG | |
| | GGCTCGCCACAACTGCA | 5695 |
| | TGCAGTTGTGGCGAGCC | 5696 |
| Met Overproduction | TCCTTCGCTTTCCTCCCAACTTTGTCCGTCAGCTCAGCACCAAGG | 5697 |
| CGS | CTCGCCGCAACTGCAACAACATTGGTGTCGCACAGGTCGTCGCT | |
| Mesembryanthemum | GCCTCCTGGTCCAACAACTCCGATGCCGGCGC | |
| crystallinum | GCGCCGGCATCGGAGTTGTTGGACCAGGAGGCAGCGACGACCT | 5698 |
| Ser77Asn | GTGCGACACCAATGTTGTTGCAGTTGCGGCGAGCCTTGGTGCTG | |
| AGC-AAC | AGCTGACGGACAAAGTTGGGAGGAAAGCGAAGGA | |
| | CAACTGCAACAACATTG | 5699 |
| | CAATGTTGTTGCAGTTG | 5700 |
| Met Overproduction | TTTCCTCCCAACTTTGTCCGTCAGCTCAGCACCAAGGCTCGCCGC | 5701 |
| CGS | AACTGCAGCAACATTAGTGTCGCACAGGTCGTCGCTGCCTCCTG | |
| Mesembryanthemum | GTCCAACAACTCCGATGCCGGCGCCACCTCTT | |
| crystallinum | AAGAGGTGGCGCCGGCATCGGAGTTGTTGGACCAGGAGGCAGC | 5702 |
| Gly80Ser | GACGACCTGTGCGACACTAATGTTGCTGCAGTTGCGGCGAGCCT | |
| GGT-AGT | TGGTGCTGAGCTGACGGACAAAGTTGGGAGGAAA | |
| | GCAACATTAGTGTCGCA | 5703 |
| | TGCGACACTAATGTTGC | 5704 |
| Met Overproduction | TTCCTCCCAACTTTGTCCGTCAGCTCAGCACCAAGGCTCGCCGCA | 5705 |
| CGS | ACTGCAGCAACATTGATGTCGCACAGGTCGTCGCTGCCTCCTGGT | |
| Mesembryanthemum | CCAACAACTCCGATGCCGGCGCCACCTCTTG | |
| crystallinum | CAAGAGGTGGCGCCGGCATCGGAGTTGTTGGACCAGGAGGCAG | 5706 |
| Gly80Asp | CGACGACCTGTGCGACATCAATGTTGCTGCAGTTGCGGCGAGCC | |
| GGT-GAT | TTGGTGCTGAGCTGACGGACAAAGTTGGGAGGAA | |
| | CAACATTGATGTCGCAC | 5707 |
| | GTGCGACATCAATGTTG | 5708 |
| Met Overproduction | CCTCTGCTACCATCCTCCGCTTTCCGCCAAACTTTGTCCGCCAGC | 5709 |
| CGS | TTAGCACCAAGGCACACCGCAACTGCAGCAACATCGGCGTCGCG | |
| Zea mays | CAGATCGTCGCCGCCGCGTGGTCCGACTGCCC | |
| Arg41His | GGGCAGTCGGACCACGCGGCGGCGACGATCTGCGCGACGCCGA | 5710 |
| CGC-CAC | TGTTGCTGCAGTTGCGGTGTGCCTTGGTGCTAAGCTGGCGGACA | |
| | AAGTTTGGCGGAAAGCGGAGGATGGTAGCAGAGG | |
| | CAAGGCACACCGCAACT | 5711 |
| | AGTTGCGGTGTGCCTTG | 5712 |
| Met Overproduction | TCCTCCGCTTTCCGCCAAACTTTGTCCGCCAGCTTAGCACCAAGG | 5713 |
| CGS | CACGCCGCAACTGCAACAACATCGGCGTCGCGCAGATCGTCGCC | |
| Zea mays | GCCGCGTGGTCCGACTGCCCCGCCGCTCGCCC | |
| Ser45Asn | GGGCGAGCGGCGGGGCAGTCGGACCACGCGGCGGCGACGATCT | 5714 |
| AGC-AAC | GCGCGACGCCGATGTTGTTGCAGTTGCGGCGTGCCTTGGTGCTA | |
| | AGCTGGCGGACAAAGTTTGGCGGAAAGCGGAGGA | |
| | CAACTGCAACAACATCG | 5715 |
| | CGATGTTGTTGCAGTTG | 5716 |
| Met Overproduction | TTTCCGCCAAACTTTGTCCGCCAGCTTAGCACCAAGGCACGCCGC | 5717 |
| CGS | AACTGCAGCAACATCAGCGTCGCGCAGATCGTCGCCGCCGCGTG | |
| Zea mays | GTCCGACTGCCCCGCCGCTCGCCCCCACTTAG | |
| Gly48Ser | CTAAGTGGGGGCGAGCGGCGGGGCAGTCGGACCACGCGGCGG | 5718 |
| GGC-AGC | CGACGATCTGCGCGACGCTGATGTTGCTGCAGTTGCGGCGTGCC | |
| | TTGGTGCTAAGCTGGCGGACAAAGTTTGGCGGAAA | |
| | GCAACATCAGCGTCGCG | 5719 |
| | CGCGACGCTGATGTTGC | 5720 |
| Met Overproduction | TTCCGCCAAACTTTGTCCGCCAGCTTAGCACCAAGGCACGCCGCA | 5721 |
| CGS | ACTGCAGCAACATCGACGTCGCGCAGATCGTCGCCGCCGCGTGG | |
| Zea mays | TCCGACTGCCCCGCCGCTCGCCCCCACTTAGG | |
| Gly48Asp | CCTAAGTGGGGGCGAGCGGCGGGGCAGTCGGACCACGCGGCG | 5722 |
| GGC-GAC | GCGACGATCTGCGCGACGTCGATGTTGCTGCAGTTGCGGCGTGC | |
| | CTTGGTGCTAAGCTGGCGGACAAAGTTTGGCGGAA | |
| | CAACATCGACGTCGCGC | 5723 |
| | GCGCGACGTCGATGTTG | 5724 |
| Met Overproduction | GTATGAATGATCTGTGGGTGAAACACTGTGGGATTAGTCATACAG | 5725 |
| TS | GAAGTTTCAAGGATCGTGGAATGACTGTTTTGGTTAGTCAAGTTAA | |
| Arabidopsis thaliana | TCGTCTGAGAAAGATGAAACGACCTGTGGT | |
| Leu205Arg | ACCACAGGTCGTTTCATCTTTCTCAGACGATTAACTTGACTAACCA | 5726 |
| CTT-CGT | AAACAGTCATTCCACGATCCTTGAAACTTCCTGTATGACTAATCCC | |
| | ACAGTGTTTCACCCACAGATCATTCATAC | |
| | CAAGGATCGTGGAATGA | 5727 |
| | TCATTCCACGATCCTTG | 5728 |
| Met Overproduction | GCATGACTGATTTGTGGGTCAAACACTGTGGGATTAGCCATACTG | 5729 |
| TS | GTAGTTTTAAGGATCGTGGGATGACTGTTTTGGTGAGTCAAGTTAA | |
| Solanum tuberosum | TCGCTTGCGGAAAATGCATAAACCGGTTGT | |
| Leu198Arg | ACAACCGGTTTATGCATTTTCCGCAAGCGATTAACTTGACTCACCA | 5730 |
| CTT-CGT | AAACAGTCATCCCACGATCCTTAAAACTACCAGTATGGCTAATCCC | |
| | ACAGTGTTTGACCCACAAATCAGTCATGC | |
| | TAAGGATCGTGGGATGA | 5731 |
| | TCATCCCACGATCCTTA | 5732 |
| Lys Overproduction | TCATTGGGCACACAGTGAACTGCTTTGGCTCTAGAATCAAAGTGA | 5733 |
| DHPS | TAGGCAACACAGGAAACAACTCAACCAGAGAAGCCGTCCACGCA | |
| Zea mays | ACAGAACAGGGATTTGCTGTTGGCATGCATGC | |
| Ser157Asn | GCATGCATGCCAACAGCAAATCCCTGTTCTGTTGCGTGGACGGCT | 5734 |
| AGC-AAC | TCTCTGGTTGAGTTGTTTCCTGTGTTGCCTATCACTTTGATTCTAG | |
| | AGCCAAAGCAGTTCACTGTGTGCCCAATGA | |
| | CACAGGAAACAACTCAA | 5735 |
| | TTGAGTTGTTTCCTGTG | 5736 |
| Lys Overproduction | GCTCTAGAATCAAAGTGATAGGCAACACAGGAAGCAACTCAACCA | 5737 |
| DHPS | GAGAAGCCGTCCACGAAACAGAACAGGGATTTGCTGTTGGCATG | |
| Zea mays | CATGCGGCTCTCCACATCAATCCTTACTACGG | |
| Ala166Val | CCGTAGTAAGGATTGATGTGGAGAGCCGCATGCATGCCAACAGC | 5738 |
| GCA-GAA | AAATCCCTGTTCTGTTTCGTGGACGGCTTCTCTGGTTGAGTTGCTT | |
| | CCTGTGTTGCCTATCACTTTGATTCTAGAGC | |
| | CGTCCACGAAACAGAAC | 5739 |
| | GTTCTGTTTCGTGGACG | 5740 |
| Lys Overproduction | GGCTCTAGAATCAAAGTGATAGGCAACACAGGAAGCAACTCAACC | 5741 |
| DHPS | AGAGAAGCCGTCCACACAACAGAACAGGGATTTGCTGTTGGCAT | |
| Zea mays | GCATGCGGCTCTCCACATCAATCCTTACTACG | |
| Ala166Thr | CGTAGTAAGGATTGATGTGGAGAGCCGCATGCATGCCAACAGCA | 5742 |
| GCA-ACA | AATCCCTGTTCTGTTGTGTGGACGGCTTCTCTGGTTGAGTTGCTTC | |
| | CTGTGTTGCCTATCACTTTGATTCTAGAGCC | |
| | CCGTCCACACAACAGAA | 5743 |
| | TTCTGTTGTGTGGACGG | 5744 |
| Lys Overproduction | TTATTGGGCATACAGTTAACTGCTTTGGCACTAAAATTAAAGTGGT | 5745 |
| DHPS | CGGCAACACAGGAAATAACTCAACAAGGGAGGCTATTCACGCAAC | |
| Oryza sativa | TGAGCAGGGATTCGCTGTAGGTATGCACGC | |
| Ser124Asn | GCGTGCATACCTACAGCGAATCCCTGCTCAGTTGCGTGAATAGCC | 5746 |
| AGT-AAT | TCCCTTGTTGAGTTATTTCCTGTGTTGCCGACCACTTTAATTTTAGT | |
| | GCCAAAGCAGTTAACTGTATGCCCAATAA | |
| | CACAGGAAATAACTCAA | 5747 |
| | TTGAGTTATTTCCTGTG | 5748 |
| Lys Overproduction | GCACTAAAATTAAAGTGGTCGGCAACACAGGAAGTAACTCAACAA | 5749 |
| DHPS | GGGAGGCTATTCACGTAACTGAGCAGGGATTCGCTGTAGGTATG | |
| Oryza sativa | CACGCGGCTCTCCACATCAATCCTTACTACGG | |
| Ala133Val | CCGTAGTAAGGATTGATGTGGAGAGCCGCGTGCATACCTACAGC | 5750 |
| GCA-GTA | GAATCCCTGCTCAGTTACGTGAATAGCCTCCCTTGTTGAGTTACTT | |
| | CCTGTGTTGCCGACCACTTTAATTTTAGTGC | |
| | TATTCACGTAACTGAGC | 5751 |
| | GCTCAGTTACGTGAATA | 5752 |
| Lys Overproduction | GGCACTAAAATTAAAGTGGTCGGCAACACAGGAAGTAACTCAACA | 5753 |
| DHPS | AGGGAGGCTATTCACACAACTGAGCAGGGATTCGCTGTAGGTAT | |
| Oryza sativa | GCACGCGGCTCTCCACATCAATCCTTACTACG | |
| Ala133Thr | CGTAGTAAGGATTGATGTGGAGAGCCGCGTGCATACCTACAGCG | 5754 |
| GCA-ACA | AATCCCTGCTCAGTTGTGTGAATAGCCTCCCTTGTTGAGTTACTTC | |
| | CTGTGTTGCCGACCACTTTAATTTTAGTGCC | |
| | CTATTCACACAACTGAG | 5755 |
| | CTCAGTTGTGTGAATAG | 5756 |
| Lys Overproduction | TCATCGGGCATACTGTTAACTGCTTTGGAGCCAACATTAAAGTGAT | 5757 |
| DHPS 1 | AGGCAACACGGGAAATAACTCAACCAGAGAAGCTGTTCACGCGA | |
| Triticum aestivum | CAGAGCAGGGATTTGCTGTTGGCATGCATGC | |
| Ser165Asn | GCATGCATGCCAACAGCAAATCCCTGCTCTGTCGCGTGAACAGCT | 5758 |
| AGT-AAT | TCTCTGGTTGAGTTATTTCCCGTGTTGCCTATCACTTTAATGTTGG | |
| | CTCCAAAGCAGTTAACAGTATGCCCGATGA | |
| | CACGGGAAATAACTCAA | 5759 |
| | TTGAGTTATTTCCCGTG | 5760 |
| Lys Overproduction | GAGCCAACATTAAAGTGATAGGCAACACGGGAAGTAACTCAACCA | 5761 |
| DHPS 1 | GAGAAGCTGTTCACGTGACAGAGCAGGGATTTGCTGTTGGCATG | |
| Triticum aestivum | CATGCAGCTCTTCATGTCAATCCTTACTACGG | |
| Ala174Val | CCGTAGTAAGGATTGACATGAAGAGCTGCATGCATGCCAACAGCA | 5762 |
| GCG-GTG | AATCCCTGCTCTGTCACGTGAACAGCTTCTCTGGTTGAGTTACTTC | |
| | CCGTGTTGCCTATCACTTTAATGTTGGCTC | |
| | TGTTCACGTGACAGAGC | 5763 |
| | GCTCTGTCACGTGAACA | 5764 |
| Lys Overproduction | GGAGCCAACATTAAAGTGATAGGCAACACGGGAAGTAACTCAACC | 5765 |
| DHPS 1 | AGAGAAGCTGTTCACACGACAGAGCAGGGATTTGCTGTTGGCAT | |
| Triticum aestivum | GCATGCAGCTCTTCATGTCAATCCTTACTACG | |
| Ala174Thr | CGTAGTAAGGATTGACATGAAGAGCTGCATGCATGCCAACAGCAA | 5766 |
| GCG-ACG | ATCCCTGCTCTGTCGTGTGAACAGCTTCTCTGGTTGAGTTACTTCC | |
| | CGTGTTGCCTATCACTTTAATGTTGGCTCC | |
| | CTGTTCACACGACAGAG | 5767 |
| | CTCTGTCGTGTGAACAG | 5768 |
| Lys Overproduction | TCATCGGGCACACTGTTAACTGCTTTGGAACTAACATTAAAGTGAT | 5769 |
| DHPS 2 | AGGCAACACGGGAAATAACTCAACTAGAGAAGCGATTCACGCTTC | |
| Triticum aestivum | AGAGCAGGGATTTGCTGTTGGCATGCATGC | |
| Ser154Asn | GCATGCATGCCAACAGCAAATCCCTGCTCTGAAGCGTGAATCGCT | 5770 |
| AGT-AAT | TCTCTAGTTGAGTTATTTCCCGTGTTGCCTATCACTTTAATGTTAGT | |
| | TCCAAAGCAGTTAACAGTGTGCCCGATGA | |
| | CACGGGAAATAACTCAA | 5771 |
| | TTGAGTTATTTCCCGTG | 5772 |
| Lys Overproduction | GAACTAACATTAAAGTGATAGGCAACACGGGAAGTAACTCAACTA | 5773 |
| DHPS 2 | GAGAAGCGATTCACGTTTCAGAGCAGGGATTTGCTGTTGGCATGC | |
| Triticum aestivum | ATGCAGCTCTCCATGTCAATCCTTACTATGG | |
| Ala163Val | CCATAGTAAGGATTGACATGGAGAGCTGCATGCATGCCAACAGCA | 5774 |
| GCT-GTT | AATCCCTGCTCTGAAACGTGAATCGCTTCTCTAGTTGAGTTACTTC | |
| | CCGTGTTGCCTATCACTTTAATGTTAGTTC | |
| | GATTCACGTTTCAGAGC | 5775 |
| | GCTCTGAAACGTGAATC | 5776 |
| Lys Overproduction | GGAACTAACATTAAAGTGATAGGCAACACGGGAAGTAACTCAACT | 5777 |
| DHPS 2 | AGAGAAGCGATTCACACTTCAGAGCAGGGATTTGCTGTTGGCATG | |
| Triticum aestivum | CATGCAGCTCTCCATGTCAATCCTTACTATG | |
| Ala163Thr | CATAGTAAGGATTGACATGGAGAGCTGCATGCATGCCAACAGCAA | 5778 |
| GCT-ACT | ATCCCTGCTCTGAAGTGTGAATCGCTTCTCTAGTTGAGTTACTTCC | |
| | CGTGTTGCCTATCACTTTAATGTTAGTTCC | |
| | CGATTCACACTTCAGAG | 5779 |
| | CTCTGAAGTGTGAATCG | 5780 |
| Lys Overproduction | CTCATTGGGCATACTGTGAACTGCTTTGGCTCTAGAATTAAAGTGA | 5781 |
| DHPS | TAGGCAACACAGGAAATAACTCAACCAGAGAAGCTGTTCACGCAA | |
| Coix lacryma-jobi | CAGAGCAGGGATTTGCTGTTGGCATGCATG | |
| Ser154Asn | CATGCATGCCAACAGCAAATCCCTGCTCTGTTGCGTGAACAGCTT | 5782 |
| AGT-AAT | CTCTGGTTGAGTTATTTCCTGTGTTGCCTATCACTTTAATTCTAGA | |
| | GCCAAAGCAGTTCACAGTATGCCCAATGAG | |
| | CACAGGAAATAACTCAA | 5783 |
| | TTGAGTTATTTCCTGTG | 5784 |
| Lys Overproduction | GCTCTAGAATTAAAGTGATAGGCAACACAGGAAGTAACTCAACCA | 5785 |
| DHPS | GAGAAGCTGTTCACGTAACAGAGCAGGGATTTGCTGTTGGCATGC | |
| Coix lacryma-jobi | ATGCAGCTCTCCACATCAATCCTTACTATGG | |
| Ala163Val | CCATAGTAAGGATTGATGTGGAGAGCTGCATGCATGCCAACAGCA | 5786 |
| GCA-GTA | AATCCCTGCTCTGTTACGTGAACAGCTTCTCTGGTTGAGTTACTTC | |
| | CTGTGTTGCCTATCACTTTAATTCTAGAGC | |
| | TGTTCACGTAACAGAGC | 5787 |
| | GCTCTGTTACGTGAACA | 5788 |
| Lys Overproduction | GGCTCTAGAATTAAAGTGATAGGCAACACAGGAAGTAACTCAACC | 5789 |
| DHPS | AGAGAAGCTGTTCACACAACAGAGCAGGGATTTGCTGTTGGCATG | |
| Coix lacryma-jobi | CATGCAGCTCTCCACATCAATCCTTACTATG | |
| Ala163Thr | CATAGTAAGGATTGATGTGGAGAGCTGCATGCATGCCAACAGCAA | 5790 |
| GCA-ACA | ATCCCTGCTCTGTTGTGTGAACAGCTTCTCTGGTTGAGTTACTTCC | |
| | TGTGTTGCCTATCACTTTAATTCTAGAGCC | |
| | CTGTTCACACAACAGAG | 5791 |
| | CTCTGTTGTGTGAACAG | 5792 |
| Lys Overproduction | TCATTGGTCACACAGTCAATTGTTTTGGAGGGTCCATCAAAGTCAT | 5793 |
| DHPS | CGGGAACACTGGAAACAACTCCACAAGGGAAGCAATCCATGCAA | |
| Nicotiana tabacum | CTGAACAGGGATTTGCTGTAGGTATGCATGC | |
| Ser136Asn | GCATGCATACCTACAGCAAATCCCTGTTCAGTTGCATGGATTGCTT | 5794 |
| AGC-AAC | CCCTTGTGGAGTTGTTTCCAGTGTTCCCGATGACTTTGATGGACC | |
| | CTCCAAAACAATTGACTGTGTGACCAATGA | |
| | CACTGGAAACAACTCCA | 5795 |
| | TGGAGTTGTTTCCAGTG | 5796 |
| Lys Overproduction | GAGGGTCCATCAAAGTCATCGGGAACACTGGAAGCAACTCCACAA | 5797 |
| DHPS | GGGAAGCAATCCATGTAACTGAACAGGGATTTGCTGTAGGTATGC | |
| Nicotiana tabacum | ATGCAGCTCTTCACATTAATCCCTACTATGG | |
| Ala145Val | CCATAGTAGGGATTAATGTGAAGAGCTGCATGCATACCTACAGCA | 5798 |
| GCA-GTA | AATCCCTGTTCAGTTACATGGATTGCTTCCCTTGTGGAGTTGCTTC | |
| | CAGTGTTCCCGATGACTTTGATGGACCCTC | |
| | AATCCATGTAACTGAAC | 5799 |
| | GTTCAGTTACATGGATT | 5800 |
| Lys Overproduction | GGAGGGTCCATCAAAGTCATCGGGAACACTGGAAGCAACTCCAC | 5801 |
| DHPS | AAGGGAAGCAATCCATACAACTGAACAGGGATTTGCTGTAGGTAT | |
| Nicotiana tabacum | GCATGCAGCTCTTCACATTAATCCCTACTATG | |
| Ala145Thr | CATAGTAGGGATTAATGTGAAGAGCTGCATGCATACCTACAGCAA | 5802 |
| GCA-ACA | ATCCCTGTTCAGTTGTATGGATTGCTTCCCTTGTGGAGTTGCTTCC | |
| | AGTGTTCCCGATGACTTTGATGGACCCTCC | |
| | CAATCCATACAACTGAA | 5803 |
| | TTCAGTTGTATGGATTG | 5804 |
| Lys Overproduction | TTATAGGCCATACCGTTAACTGTTTTGGCGGAAGCATCAAAGTCAT | 5805 |
| DHPS | TGGAAACACTGGAAACAATTCGACTAGAGAAGCAATCCACGCGAC | |
| Arabidopsis thaliana | TGAACAAGGATTCGCGGTTGGAATGCATGC | |
| Ser142Asn | GCATGCATTCCAACCGCGAATCCTTGTTCAGTCGCGTGGATTGCT | 5806 |
| AGC-AAC | TCTCTAGTCGAATTGTTTCCAGTGTTTCCAATGACTTTGATGCTTC | |
| | CGCCAAAACAGTTAACGGTATGGCCTATAA | |
| | CACTGGAAACAATTCGA | 5807 |
| | TCGAATTGTTTCCAGTG | 5808 |
| Lys Overproduction | GCGGAAGCATCAAAGTCATTGGAAACACTGGAAGCAATTCGACTA | 5809 |
| DHPS | GAGAAGCAATCCACGTGACTGAACAAGGATTCGCGGTTGGAATG | |
| Arabidopsis thaliana | CATGCTGCTCTTCATATAAACCCTTACTATGG | |
| Ala151Val | CCATAGTAAGGGTTTATATGAAGAGCAGCATGCATTCCAACCGCG | 5810 |
| GCG-GTG | AATCCTTGTTCAGTCACGTGGATTGCTTCTCTAGTCGAATTGCTTC | |
| | CAGTGTTTCCAATGACTTTGATGCTTCCGC | |
| | AATCCACGTGACTGAAC | 5811 |
| | GTTCAGTCACGTGGATT | 5812 |
| Lys Overproduction | GGCGGAAGCATCAAAGTCATTGGAAACACTGGAAGCAATTCGACT | 5813 |
| DHPS | AGAGAAGCAATCCACACGACTGAACAAGGATTCGCGGTTGGAAT | |
| Arabidopsis thallana | GCATGCTGCTCTTCATATAAACCCTTACTATG | |
| Ala151Thr | CATAGTAAGGGTTTATATGAAGAGCAGCATGCATTCCAACCGCGA | 5814 |
| GCG-ACG | ATCCTTGTTCAGTCGTGTGGATTGCTTCTCTAGTCGAATTGCTTCC | |
| | AGTGTTTCCAATGACTTTGATGCTTCCGCC | |
| | CAATCCACACGACTGAA | 5815 |
| | TTCAGTCGTGTGGATTG | 5816 |
| Lys Overproduction | TTATTGCTCATACAGTCAACTGTTTTGGTGGGAAAATTAAGGTTAT | 5817 |
| DHPS | TGGAAATACTGGAAACAACTCCACCAGGGAAGCAATTCATGCCAC | |
| Glycine max | TGAGCAGGGTTTTGCTGTTGGAATGCATGC | |
| Ser103Asn | GCATGCATTCCAACAGCAAAACCCTGCTCAGTGGCATGAATTGCT | 5818 |
| AGC-AAC | TCCCTGGTGGAGTTGTTTCCAGTATTTCCAATAACCTTAATTTTCC | |
| | CACCAAAACAGTTGACTGTATGAGCAATAA | |
| | TACTGGAAACAACTCCA | 5819 |
| | TGGAGTTGTTTCCAGTA | 5820 |
| Lys Overproduction | GTGGGAAAATTAAGGTTATTGGAAATACTGGAAGCAACTCCACCA | 5821 |
| DHPS | GGGAAGCAATTCATGTCACTGAGCAGGGTTTTGCTGTTGGAATGC | |
| Glycine max | ATGCTGCCCTTCACATAAACCCTTACTATGG | |
| Ala112Val | CCATAGTAAGGGTTTATGTGAAGGGCAGCATGCATTCCAACAGCA | 5822 |
| GCC-GTC | AAACCCTGCTCAGTGACATGAATTGCTTCCCTGGTGGAGTTGCTT | |
| | CCAGTATTTCCAATAACCTTAATTTTCCCAC | |
| | AATTCATGTCACTGAGC | 5823 |
| | GCTCAGTGACATGAATT | 5824 |
| Lys Overproduction | GGTGGGAAAATTAAGGTTATTGGAAATACTGGAAGCAACTCCACC | 5825 |
| DHPS | AGGGAAGCAATTCATACCACTGAGCAGGGTTTTGCTGTTGGAATG | |
| Glycine max | CATGCTGCCCTTCACATAAACCCTTACTATG | |
| Ala112Thr | CATAGTAAGGGTTTATGTGAAGGGCAGCATGCATTCCAACAGCAA | 5826 |
| GCC-ACC | AACCCTGCTCAGTGGTATGAATTGCTTCCCTGGTGGAGTTGCTTC | |
| | CAGTATTTCCAATAACCTTAATTTTCCCACC | |
| | CAATTCATACCACTGAG | 5827 |
| | CTCAGTGGTATGAATTG | 5828 |
| Trp Overproduction | CTTGCAGGAGACATATTTCAGATCGTGCTGAGTCAACGTTTTGAG | 5829 |
| AS | CGGCGAACATTTGCAAACCCCTTTGAAGTTTATAGAGCACTAAGA | |
| Arabidopsis thallana | GTTGTGAATCCAAGTCCGTATATGGGTTATT | |
| Asp341Asn | AATAACCCATATACGGACTTGGATTCACAACTCTTAGTGCTCTATA | 5830 |
| GAC-AAC | AACTTCAAAGGGGTTTGCAAATGTTCGCCGCTCAAAACGTTGACT | |
| | CAGCACGATCTGAAATATGTCTCCTGCAAG | |
| | CATTTGCAAACCCCTTT | 5831 |
| | AAAGGGGTTTGCAAATG | 5832 |
| Trp Overproduction | GCTGCAGGAGACATATTTCAAATCGTTTTAAGTCAACGCTTTGAGA | 5833 |
| AS | GAAGAACATTTGCTAACCCATTTGAAGTGTACAGAGCATTAAGAAT | |
| Nicotiana tabacum | TGTGAATCCAAGGCCATATATGACTTACA | |
| Asp326Asn | TGTAAGTCATATATGGGCTTGGATTCACAATTCTTAATGCTCTGTA | 5834 |
| GAC-AAC | CACTTCAAATGGGTTAGCAAATGTTCTTCTCTCAAAGCGTTGACTT | |
| | AAAACGATTTGAAATATGTCTCCTGCAGC | |
| | CATTTGCTAACCCATTT | 5835 |
| | AAATGGGTTAGCAAATG | 5836 |
| Trp Overproduction | CTAGCTGGTGACATTTTTCAAGTAGTCTTAAGCCAGCGTTTTGAGA | 5837 |
| AS | GGCGTACATTTGCTAACCCCTTTGAGGTGTACCGTGCATTGCGTA | |
| Orvza sativa | TTGTCAATCCTAGTCCTTATATGGCCTATC | |
| Asp323Asn | GATAGGCCATATAAGGACTAGGATTGACAATACGCAATGCACGGT | 5838 |
| GAC-AAG | ACACCTCAAAGGGGTTAGCAAATGTACGCCTCTCAAAACGCTGGC | |
| | TTAAGACTACTTGAAAAATGTCACCAGCTAG | |
| | CATTTGCTAACCCCTTT | 5839 |
| | AAAGGGGTTAGCAAATG | 5840 |
| Trp Overproduction | CTTGCTGGTGACATATTCCAGATCGTACTAAGTCAGCGTTTTGAAA | 5841 |
| AS | GGCGAACGTTCGCAAACCCATTTGAAATCTATAGATCACTGAGGA | |
| Ruta graveolens | TTGTTAATCCAAGCCCATATATGACTTATT | |
| Asp354Asn | AATAAGTCATATATGGGCTTGGATTAACAATCCTCAGTGATCTATA | 5842 |
| GAC-AAC | GATTTCAAATGGGTTTGCGAACGTTCGCCTTTCAAAACGCTGACTT | |
| | AGTACGATCTGGAATATGTCACCAGCAAG | |
| | CGTTCGCAAACCCATTT | 5843 |
| | AAATGGGTTTGCGAACG | 5844 |
| Trp Overproduction | CTGGCTGGGGACATATTCCAGCTTGTCCTAAGTCAGCGTTTTGAA | 5845 |
| AS | CGGCGAACATTTGCAAATCCATTTGAAGTCTACCGAGCATTGAGA | |
| Catharanthus roseus | ATTGTCAACCCAAGTCCATATATGACTTATT | |
| Asp354Asn | AATAAGTCATATATGGACTTGGGTTGACAATTCTCAATGCTCGGTA | 5846 |
| GAT-AAT | GACTTCAAATGGATTTGCAAATGTTCGCCGTTCAAAACGCTGACTT | |
| | AGGACAAGCTGGAATATGTCCCCAGCCAG | |
| | CATTTGCAAATCCATTT | 5847 |
| | AAATGGATTTGCAAATG | 5848 |

### EXAMPLE 31

### Production of Modified Starch in Plants

[0267] A principal aim of biotechnology is the improvement of crop plants for food value, agriculture, and to produce a range of plant-derived raw materials. Along with oils, fats and proteins, polysaccharides constitute the main raw materials derived from plants, and apart from cellulose, the storage polymer starch is the most important polysaccharide raw material. Starch is derived from a range of plants, but maize is the most important cultivated plant for the production of starch.

[0268] The polysaccharide starch is a polymer made up of glucose molecules. However, starch is not a homogeneous raw material and is, in fact, a highly complex mixture of various types of molecules which differ from each other, for example, in their degree of polymerization and in the degree of branching of the glucose chains. For example, amylose-starch is a basically non-branched polymer made up of a-1,4-glycosidically branched glucose molecules, and amylopectin-starch is a complex mixture of variously branched glucose chains. The branching results from additional a-1,6-glycosidic linkages. In plants from which starch is typically isolated, for example maize or potato, the starch is approximately 25% amylose-starch and 75% amylopectin-starch.

[0269] In maize, various mutants in starch metabolism are known, for example waxy, sugary, shrunken and opaque-2. In addition to producing a modified starch, these mutations greatly improve grain quality in maize, and thus expand the use of maize not only as the food but also for the important industrial materials in food chemistry. It would therefore be advantageous to be able readily to obtain mutants in these genes in particular maize genotypes as well as other plants. Such plants can be obtained, for example, using traditional breeding methods and through specific genetic modification by means of recombinant DNA techniques.

[0270] The attached tables disclose exemplary oligonucleotide base sequences which can be used to generate site-specific mutations in genes involved in starch metabolism.

TABLE 38
Genome-Altering Oligos Conferring Increased Starch

| Phenotype, Gene, | | |
|---|---|---|
| Plant & Targeted | | SEQ ID |
| Alteration | Altering Oligos | NO: |
| Increased Starch | GAACTTGAGACTGAGAAAAGGGATCCAAGGACAGTTGCTTCCATT | 5849 |
| ADPGPP | ATTCTTGGAGGTGGAAAAGGAACTCGACTCTTTCCTCTCACAAAA | |
| Arabidopsis thaliana | CGCCGCGCCAAGCCTGCCGTTCCTATCGGGG | |
| Ala99Lys | CCCCGATAGGAACGGCAGGCTTGGCGCGGCGTTTTGTGAGAGGA | 5850 |
| GCA-AAA | AAGAGTCGAGTTCCTTTTCCACCTCCAAGAATAATGGAAGCAACT | |
| | GTCCTTGGATCCCTTTTCTCAGTCTCAAGTTC | |
| | GAGGTGGAAAAGGAACT | 5851 |
| | AGTTCCTTTTCCACCTC | 5852 |
| Increased Starch | CAAAACGCCGCGCCAAGCCTGCCGTTCCTATCGGGGGAGCCTAT | 5853 |
| ADPGPP | AGGTTGATAGATGTACTAATGAGCAATTGTATTAACAGCGGAATCA | |
| Arabidopsis thaliana | ACAAAGTCTACATACTCACACAATATAACTC | |
| Pro127Leu | GAGTTATATTGTGTGAGTATGTAGACTTTGTTGATTCCGCTGTTAA | 5854 |
| CCA-CTA | TACAATTGCTCATTAGTACATCTATCAACCTATAGGCTCCCCCGAT | |
| | AGGAACGGCAGGCTTGGCGCGGCGTTTTG | |
| | AGATGTACTAATGAGCA | 5855 |
| | TGCTCATTAGTACATCT | 5856 |
| Increased Starch | TCACACAATATAACTCAGCATCATTGAACAGGCATTTAGCCCGTGC | 5857 |
| ADPGPP | TTACAACTCCAATAATCTTGGCTTTGGAGATGGCTATGTTGAGGTT | |
| Arabidopsis thaliana | CTTGCGGCCACTCAAACGCCAGGAGAATC | |
| Gly162Asn | GATTCTCCTGGCGTTTGAGTGGCCGCAAGAACCTCAACATAGCCA | 5858 |
| GGA-AAT | TCTCCAAAGCCAAGATTATTGGAGTTGTAAGCACGGGCTAAATGC | |
| | CTGTTCAATGATGCTGAGTTATATTGTGTGA | |
| | CTCCAATAATCTTGGCT | 5859 |
| | AGCCAAGATTATTGGAG | 5860 |
| Increased Starch | TCACACAATATAACTCAGCATCATTGAACAGGCATTTAGCCCGTGC | 5861 |
| ADPGPP | TTACAACTCCAATAACCTTGGCTTTGGAGATGGCTATGTTGAGGTT | |
| Arabidopsis thaliana | CTTGCGGCCACTCAAACGCCAGGAGAATC | |
| Gly162Asn | GATTCTCCTGGCGTTTGAGTGGCCGCAAGAACCTCAACATAGCCA | 5862 |
| GGA-AAC | TCTCCAAAGCCAAGGTTATTGGAGTTGTAAGCACGGGCTAAATGC | |
| | CTGTTCAATGATGCTGAGTTATATTGTGTGA | |
| | CTCCAATAACCTTGGCT | 5863 |
| | AGCCAAGGTTATTGGAG | 5864 |
| Increased Starch | GTTTGAGAGAAGAAAGGTAGACCCGCAAAATGTGGCTGCAATCAT | 5865 |
| ADPGPP | TCTAGGAGGAGGCAAAGGAGCTAAACTCTTCCCTCTTACAATGAG | |
| Arabidopsis thaliana | AGCCGCAACACCAGCTGTAAATATTCATCTT | |
| Asn100Lys | AAGATGAATATTTACAGCTGGTGTTGCGGCTCTCATTGTAAGAGG | 5866 |
| AAT-AAA | GAAGAGTTTAGCTCCTTTGCCTCCTCCTAGAATGATTGCAGCCAC | |
| | ATTTTGCGGGTCTACCTTTCTTCTCTCAAAC | |
| | GGAGGCAAAGGAGCTAA | 5867 |
| | TTAGCTCCTTTGCCTCC | 5868 |
| Increased Starch | CTTGTGTCTTCAAATTATGTTAGGTTCCTGTTGGTGGATGCTACAG | 5869 |
| ADPGPP | GCTGATCGATATCCTGATGAGTAACTGTATTAACAGCTGCATCAAC | |
| Arabidopsis thaliana | AAGATATTTGTGCTGACACAGTTCAACTC | |
| Pro128Leu | GAGTTGAACTGTGTCAGCACAAATATCTTGTTGATGCAGCTGTTAA | 5870 |
| CCG-CTG | TACAGTTACTCATCAGGATATCGATCAGCCTGTAGCATCGACCAA | |
| | CAGGAACCTAACATAATTTGAAGACACAAG | |
| | CGATATCCTGATGAGTA | 5871 |
| | TACTCATCAGGATATCG | 5872 |
| Increased Starch | TGACACAGTTCAACTCAGCTTCCCTTAATCGACATTTAGCACGAAC | 5873 |
| ADPGPP | TTATTTTGGGAATAATATAAACTTTGGAGGTGGTTTCGTAGAGGTA | |
| Arabidopsis thaliana | CAAACACTATGACAATAATAACTCTCAGC | |
| Gly163Asn | GCTGAGAGTTATTATTGTCATAGTGTTTGTACCTCTACGAAACCAC | 5874 |
| GGC-AAT | CTCCAAAGTTTATATTATTCCCAAAATAAGTTCGTGCTAAATGTCG | |
| | ATTAAGGGAAGCTGAGTTGAACTGTGTCA | |
| | TGGGAATAATATAAACT | 5875 |
| | AGTTTATATTATTCCCA | 5876 |
| Increased Starch | TGACACAGTTCAACTCAGCTTCCCTTAATCGACATTTAGCACGAAC | 5877 |
| ADPGPP | TTATTTTGGGAATAACATAAACTTTGGAGGTGGTTTCGTAGAGGTA | |
| Arabidopsis thaliana | CAAACACTATGACAATAATAACTCTCAGC | |
| Gly163Asn | GCTGAGAGTTATTATTGTCATAGTGTTTGTACCTCTACGAAACCAC | 5878 |
| GGC-AAC | CTCCAAAGTTTATGTTATTCCCAAAATAAGTTCGTGCTAAATGTCG | |
| | ATTAAGGGAAGCTGAGTTGAACTGTGTCA | |
| | TGGGAATAACATAAACT | 5879 |
| | AGTTTATGTTATTCCCA | 5880 |
| Increased Starch | TTGAGGAACAACCAACGGCAGATCCAAAAGCTGTTGCCTCTGTCA | 5881 |
| ADPGPP | TTCTAGGTGGTGGTAAAGGAACTCGTCTTTTTCCTCTTACAAGCA | |
| Lycopersicon | GAAGAGCTAAACCAGCTGTTCCTATTGGTGG | |
| esculentum | CCACCAATAGGAACAGCTGGTTTAGCTCTTCTGCTTGTAAGAGGA | 5882 |
| Val94Lys | AAAAGACGAGTTCCTTTACCACCACCTAGAATGACAGAGGCAACA | |
| GTT-AAA | GCTTTTGGATCTGCCGTTGGTTGTTCCTCAA | |
| | TGGTGGTAAAGGAACTC | 5883 |
| | GAGTTCCTTTACCACCA | 5884 |
| Increased Starch | CAAGCAGAAGAGCTAAACCAGCTGTTCCTATTGGTGGTTGTTACC | 5885 |
| ADPGPP | GGCTAATTGATGTACAAATGAGTAACTGCATTAACAGTGGCATAC | |
| Lycopersicon | GGAAAATTTTCATCTTAACACAGTTCAATTC | |
| esculentum | GAATTGAACTGTGTTAAGATGAAAATTTTCCGTATGCCACTGTTAA | 5886 |
| Pro122Leu | TGCAGTTACTCATTTGTACATCAATTAGCCGGTAACAACCACCAAT | |
| CCA-CAA | AGGAACAGCTGGTTTAGCTCTTCTGCTTG | |
| | TGATGTACAAATGAGTA | 5887 |
| | TACTCATTTGTACATCA | 5888 |
| Increased Starch | CACAGTTCAATTCCTTTTCCCTCAATCGTCACCTTGCCCGCACGTA | 5889 |
| ADPGPP | TAATTTTGGAAATAATGTGGGTTTTGGAGATGGATTTGTGGAGGTT | |
| Lycopersicon | TTAGCTGCAACCCAGACTCCAGGGGATGC | |
| esculentum | GCATCCCCTGGAGTCTGGGTTGCAGCTAAAACCTCCACAAATCCA | 5890 |
| Gly158Asn | TCTCCAAAACCCACATTATTTCCAAAATTATACGTGCGGGCAAGGT | |
| GGA-AAT | GACGATTGAGGGAAAAGGAATTGAACTGTG | |
| | TGGAAATAATGTGGGTT | 5891 |
| | AACCCACATTATTTCCA | 5892 |
| Increased Starch | CACAGTTCAATTCCTTTTCCCTCAATCGTCACCTTGCCCGCACGTA | 5893 |
| ADPGPP | TAATTTTGGAAATAACGTGGGTTTTGGAGATGGATTTGTGGAGGT | |
| Lycopersicon | TTTAGCTGCAACCCAGACTCCAGGGGATGC | |
| esculentum | GCATCCCCTGGAGTCTGGGTTGCAGCTAAAACCTCCACAAATCCA | 5894 |
| Gly158Asn | TCTCCAAAACCCACGTTATTTCCAAAATTATACGTGCGGGCAAGGT | |
| GGA-AAC | GACGATTGAGGGAAAAGGAATTGAACTGTG | |
| | TGGAAATAACGTGGGTT | 5895 |
| | AACCCACGTTATTTCCA | 5896 |
| Increased Starch | ACGTAGATTTGGAAAAAAGAGACCCAAGTACAGTTGTAGCAATTAT | 5897 |
| ADPGPP | ACTAGGTGGAGGTAAAGGAACTCGTCTCTTCCCTCTCACCAAGCG | |
| Cicer arietinum | ACGAGCCAAGCCTGCTGTTCCAATTGGAGG | |
| Ala101Lys | CCTCCAATTGGAACAGCAGGCTTGGCTCGTCGCTTGGTGAGAGG | 5898 |
| GCT-AAA | GAAGAGACGAGTTCCTTTACCTCCACCTAGTATAATTGCTACAACT | |
| | GTACTTGGGTCTCTTTTTTCCAAATCTACGT | |
| | TGGAGGTAAAGGAACTC | 5899 |
| | GAGTTCCTTTACCTCCA | 5900 |
| Increased Starch | CCAAGCGACGAGCCAAGCCTGCTGTTCCAATTGGAGGTGCTTATA | 5901 |
| ADPGPP | GGCTGATAGATGTACTAATGAGTAACTGCATCAATAGTGGGATCA | |
| Cicer arietinum | ACAAAGTATACATTCTCACTCAATTTAATTC | |
| Pro129Leu | GAATTAAATTGAGTGAGAATGTATACTTTGTTGATCCCACTATTGA | 5902 |
| CCA-CTA | TGCAGTTACTCATTAGTACATCTATCAGCCTATAAGCACCTCCAAT | |
| | TGGAACAGCAGGCTTGGCTCGTCGCTTGG | |
| | AGATGTACTAATGAGTA | 5903 |
| | TACTCATTAGTACATCT | 5904 |
| Increased Starch | CTCAATTTAATTCAGCCTCACTCAACAGGCATATTGCACGTGCTTA | 5905 |
| ADPGPP | TAACTCTGGTACTAATGTCACTTTTGGAGATGGCTATGTTGAGGTT | |
| Cicer arietinum | CTTGCAGCAACTCAAACTCCAGGGGAGCA | |
| Gly165Asn | TGCTCCCCTGGAGTTTGAGTTGCTGCAAGAACCTCAACATAGCCA | 5906 |
| GGA-AAT | TCTCCAAAAGTGACATTAGTACCAGAGTTATAAGCACGTGCAATAT | |
| | GCCTGTTGAGTGAGGCTGAATTAAATTGAG | |
| | TGGTACTAATGTCACTT | 5907 |
| | AAGTGACATTAGTACCA | 5908 |
| Increased Starch | CTCAATTTAATTCAGCCTCACTCAACAGGCATATTGCACGTGCTTA | 5909 |
| ADPGPP | TAACTCTGGTACTAACGTCACTTTTGGAGATGGCTATGTTGAGGTT | |
| Cicer arietinum | CTTGCAGCAACTCAAACTCCAGGGGAGCA | |
| Gly165Asn | TGCTCCCCTGGAGTTTGAGTTGCTGCAAGAACCTCAACATAGCCA | 5910 |
| GGA-AAC | TCTCCAAAAGTGACGTTAGTACCAGAGTTATAAGCACGTGCAATAT | |
| | GCCTGTTGAGTGAGGCTGAATTAAATTGAG | |
| | TGGTACTAACGTCACTT | 5911 |
| | AAGTGACGTTAGTACCA | 5912 |
| Increased Starch | ATATTGGAGAGGCGTCGGGCAAACCCTAAGAATGTGGCTGCAATC | 5913 |
| ADPGPP | ATACTGCCAGGCGGTAAAGGGACACACCTATTCCCTCTCACCAAT | |
| Ipomoea batatas | CGAGCTGCAACCCCTGCTGTTCCACTTGGAG | |
| Ala94Lys | CTCCAAGTGGAACAGCAGGGGTTGCAGCTCGATTGGTGAGAGGG | 5914 |
| GCA-AAA | AATAGGTGTGTCCCTTTACCGCCTGGCAGTATGATTGCAGCCACA | |
| | TTCTTAGGGTTTGCCCGACGCCTCTCCAATAT | |
| | CAGGCGGTAAAGGGACA | 5915 |
| | TGTCCCTTTACCGCCTG | 5916 |
| Increased Starch | CCAATCGAGCTGCAACCCCTGCTGTTCCACTTGGAGGATGCTATA | 5917 |
| ADPGPP | GGTTGATCGACATTCTAATGAGCAACTGCATCAACAGCGGGGTTA | |
| Ipomoea batatas | ACAAGATCTTTGTGCTGACCCAGTTCAATTC | |
| Pro122Leu | GAATTGAACTGGGTCAGCACAAAGATCTTGTTAACCCCGCTGTTG | 5918 |
| CCA-CTA | ATGCAGTTGCTCATTAGAATGTCGATCAACCTATAGCATCCTCCAA | |
| | GTGGAACAGCAGGGGTTGCAGCTCGATTGG | |
| | CGACATTCTAATGAGCA | 5919 |
| | TGCTCATTAGAATGTCG | 5920 |
| Increased Starch | TGACCCAGTTCAATTCAGCTTCTCTTAACCGTCACATTTCCCGTAC | 5921 |
| ADPGPP | CGTCTTTGGCAATAATGTGAGCTTCGGAGATGGATTTGTTGAGGT | |
| Ipomoea batatas | GCTGGCTGCAACCCAAACACAAGGGGAAAC | |
| Gly157Asn | GTTTCCCCTTGTGTTTGGGTTGCAGCCAGCACCTCAACAAATCCA | 5922 |
| GGT-AAT | TCTCCGAAGCTCACATTATTGCCAAAGACGGTACGGGAAATGTGA | |
| | CGGTTAAGAGAAGCTGAATTGAACTGGGTCA | |
| | TGGCAATAATGTGAGCT | 5923 |
| | AGCTCACATTATTGCCA | 5924 |
| Increased Starch | TGACCCAGTTCAATTCAGCTTCTCTTAACCGTCACATTTCCCGTAC | 5925 |
| ADPGPP | CGTCTTTGGCAATAACGTGAGCTTCGGAGATGGATTTGTTGAGGT | |
| Ipomoea batatas | GCTGGCTGCAACCCAAACACAAGGGGAAAC | |
| Gly157Asn | GTTTCCCCTTGTGTTTGGGTTGCAGCCAGCACCTCAACAAATCCA | 5926 |
| GGT-AAC | TCTCCGAAGCTCACGTTATTGCCAAAGACGGTACGGGAAATGTGA | |
| | CGGTTAAGAGAAGCTGAATTGAACTGGGTCA | |
| | TGGCAATAACGTGAGCT | 5927 |
| | AGCTCACGTTATTGCCA | 5928 |
| Increased Starch | CATTCCGGAGGAACTTTGCGGATCCAAATGAGGTTGCTGCTGTTA | 5929 |
| ADPGPP | TATTGGGTGGTGGCAAAGGGACTCAACTTTTTCCTCTCACAAGCA | |
| Oryza sativa | CAAGGGCCACGCCTGCTGTTCCTATTGGAGG | |
| Thr96Lys | CCTCCAATAGGAACAGCAGGCGTGGCCCTTGTGCTTGTGAGAGG | 5930 |
| ACC-AAA | AAAAAGTTGAGTCCCTTTGCCACCACCCAATATAACAGCAGCAAC | |
| | CTCATTTGGATCCGCAAAGTTCCTCCGGAATG | |
| | TGGTGGCAAAGGGACTC | 5931 |
| | GAGTCCCTTTGCCACCA | 5932 |
| Increased Starch | CAAGCACAAGGGCCACGCCTGCTGTTCCTATTGGAGGATGCTATA | 5933 |
| ADPGPP | GGCTTATCGATATCCTCATGAGCAACTGTTTCAACAGTGGCATAAA | |
| Oryza sativa | CAAGATATTCATAATGACTCAATTCAACTC | |
| Pro124Leu | GAGTTGAATTGAGTCATTATGAATATCTTGTTTATGCCACTGTTGA | 5934 |
| CCC-CTC | AACAGTTGCTCATGAGGATATCGATAAGCCTATAGCATCCTCCAAT | |
| | AGGAACAGCAGGCGTGGCCCTTGTGCTTG | |
| | CGATATCCTCATGAGCA | 5935 |
| | TGCTCATGAGGATATCG | 5936 |
| Increased Starch | TGACTCAATTCAACTCAGCATCTCTTAATCGTCACATTCATCGTAC | 5937 |
| ADPGPP | GTACCTTGGTGGTAATATCAACTTTACTGATGGTTCTGTTGAGGTA | |
| Oryza sativa | TTAGCCGCTACACAAATGCCTGGGGAGGC | |
| Gly159Asn | GCCTCCCCAGGCATTTGTGTAGCGGCTAATACCTCAACAGAACCA | 5938 |
| GGA-AAT | TCAGTAAAGTTGATATTACCACCAAGGTACGTACGATGAATGTGA | |
| | CGATTAAGAGATGCTGAGTTGAATTGAGTCA | |
| | TGGTGGTAATATCAACT | 5939 |
| | AGTTGATATTACCACCA | 5940 |
| Increased Starch | TGACTCAATTCAACTCAGCATCTCTTAATCGTCACATTCATCGTAC | 5941 |
| ADPGPP | GTACCTTGGTGGTAACATCAACTTTACTGATGGTTCTGTTGAGGTA | |
| Oryza sativa | TTAGCCGCTACACAAATGCCTGGGGAGGC | |
| Gly159Asn | GCCTCCCCAGGCATTTGTGTAGCGGCTAATACCTCAACAGAACCA | 5942 |
| GGA-AAC | TCAGTAAAGTTGATGTTACCACCAAGGTACGTACGATGAATGTGA | |
| | CGATTAAGAGATGCTGAGTTGAATTGAGTCA | |
| | TGGTGGTAACATCAACT | 5943 |
| | AGTTGATGTTACCACCA | 5944 |
| Increased Starch | GTCCTTCAGGAGGATTAAGCGATCCGAACGAGGTTGCGGCCGTC | 5945 |
| ADPGPP | ATACTCGGCGGCGGCAAAGGGACTCAGCTCTTCCCACTCACGAG | |
| Triticum aestivum | CACAAGGGCCACACCTGCTGTTCCTATTGGAGG | |
| Thr80Lys | CCTCCAATAGGAACAGCAGGTGTGGCCCTTGTGCTCGTGAGTGG | 5946 |
| ACC-AAA | GAAGAGCTGAGTCCCTTTGCCGCCGCCGAGTATGACGGCCGCAA | |
| | CCTCGTTCGGATCGCTTAATCCTCCTGAAGGAC | |
| | CGGCGGCAAAGGGACTC | 5947 |
| | GAGTCCCTTTGCCGCCG | 5948 |
| Increased Starch | CGAGCACAAGGGCCACACCTGCTGTTCCTATTGGAGGATGTTACA | 5949 |
| ADPGPP | GGCTCATCGACATTCTCATGAGCAACTGCTVCAACAGTGGCATCA | |
| Triticum aestivum | ACAAGATATTCGTCATGACCCAGTTCAACTC | |
| Pro108Leu | GAGTTGAACTGGGTCATGACGAATATCTTGTTGATGCCACTGTTG | 5950 |
| CCC-CTC | AAGCAGTTGCTCATGAGAATGTCGATGAGCCTGTAACATCCTCCA | |
| | ATAGGAACAGCAGGTGTGGCCCTTGTGCTCG | |
| | CGACATTCTCATGAGCA | 5951 |
| | TGCTCATGAGAATGTCG | 5952 |
| Increased Starch | TGACCCAGTTCAACTCGGCCTCCCTTAATCGTCACATTCACCGCA | 5953 |
| ADPGPP | CCTACCTCGGCGGGAATATCAATTTCACTGATGGATCCGTTGAGG | |
| Triticum aestivum | TATTGGCCGCGACGCAAATGCCCGGGGAGGC | |
| Gly143Asn | GCCTCCCCGGGCATTTGCGTCGCGGCCAATACCTCAACGGATCC | 5954 |
| GGA-AAT | ATCAGTGAAATTGATATTCCCGCCGAGGTAGGTGCGGTGAATGTG | |
| | ACGATTAAGGGAGGCCGAGTTGAACTGGGTCA | |
| | CGGCGGGAATATCAATT | 5955 |
| | AATTGATATTCCCGCCG | 5956 |
| Increased Starch | TGACCCAGTTCAACTCGGCCTCCCTTAATCGTCACATTCACCGCA | 5957 |
| ADPGPP | CCTACCTCGGCGGGAACATCAATTTCACTGATGGATCCGTTGAGG | |
| Triticum aestivum | TATTGGCCGCGACGCAAATGCCCGGGGAGGC | |
| Gly143Asn | GCCTCCCCGGGCATTTGCGTCGCGGCCAATACCTCAACGGATCC | 5958 |
| GGA-AAC | ATCAGTGAAATTGATGTTCCCGCCGAGGTAGGTGCGGTGAATGTG | |
| | ACGATTAAGGGAGGCCGAGTTGAACTGGGTCA | |
| | CGGCGGGAACATCAATT | 5959 |
| | AATTGATGTTCCCGCCG | 5960 |
| Increased Starch | CCTCCCGAAAGAATTATGCTGATGCAAGCCACGTTTCTGCTGTCA | 5961 |
| ADPGPP | TTTTGGGTGGAGGCAAAGGAGTTCAACTCTTTCCTCTGACAAGCA | |
| Oryza sativa | CAAGGGCTACCCCCGCTGTTCCTGTTGGAGG | |
| Thr95Lys | CCTCCAACAGGAACAGCGGGGGTAGCCCTTGTGCTTGTCAGAGG | 5962 |
| ACT-AAA | AAAGAGTTGAACTCCTTTGCCTCCACCCAAAATGACAGCAGAAAC | |
| | GTGGCTTGCATCAGCATAATTCTTTCGGGAGG | |
| | TGGAGGCAAAGGAGTTC | 5963 |
| | GAACTCCTTTGCCTCCA | 5964 |
| Increased Starch | CAAGCACAAGGGCTACCCCCGCTGTTCCTGTTGGAGGATGTTACA | 5965 |
| ADPGPP | GGCTTATTGACATCCTTATGAGCAATTGCTTCAATAGCGGAATAAA | |
| Oryza sativa | TAAAATATTTGTGATGACTCAGTTCAATTC | |
| Pro123Leu | GAATTGAACTGAGTCATCACAAATATTTTATTTATTCCGCTATTGAA | 5966 |
| CCT-CTT | GCAATTGCTCATAAGGATGTCAATAAGCCTGTAACATCCTCCAACA | |
| | GGAACAGCGGGGGTAGCCCTTGTGCTTG | |
| | TGACATCCTTATGAGCA | 5967 |
| | TGCTCATAAGGATGTCA | 5968 |
| Increased Starch | TGACTCAGTTCAATTCTGCTTCTCTTAATCGCCATATCCATCATACA | 5969 |
| ADPGPP | TACCTTGGTGGGAATATCAACTTTACTGATGGGTCTGTGCAGGTA | |
| Oryza sativa | TTGGCTGCTACACAAATGCCTGACGAACC | |
| Gly158Asn | GGTTCGTCAGGCATTTGTGTAGCAGCCAATACCTGCACAGACCCA | 5970 |
| GGG-AAT | TCAGTAAAGTTGATATTCCCACCAAGGTATGTATGATGGATATGGC | |
| | GATTAAGAGAAGCAGAATTGAACTGAGTCA | |
| | TGGTGGGAATATCAACT | 5971 |
| | AGTTGATATTCCCACCA | 5972 |
| Increased Starch | TGACTCAGTTCAATTCTGCTTCTCTTAATCGCCATATCCATCATACA | 5973 |
| ADPGPP | TACCTTGGTGGGAACATCAACTTTACTGATGGGTCTGTGCAGGTA | |
| Oryza sativa | TTGGCTGCTACACAAATGCCTGACGAACC | |
| Gly158Asn | GGTTCGTCAGGCATTTGTGTAGCAGCCAATACCTGCACAGACCCA | 5974 |
| GGG-AAC | TCAGTAAAGTTGATGTTCCCACCAAGGTATGTATGATGGATATGG | |
| | CGATTAAGAGAAGCAGAATTGAACTGAGTCA | |
| | TGGTGGGAACATCAACT | 5975 |
| | AGTTGATGTTCCCACCA | 5976 |
| Increased Starch | CCTTCCGCAGGAATTACGCCGATCCGAACGAGGTCGCGGCCGTC | 5977 |
| ADPGPP | ATACTCGGCGGTGGCAAAGGGACTCAGCTCTTCCCTCTCACAAG | |
| Triticum aestivum | CACAAGGGCCACACCTGCTGTTCCTATTGGAGG | |
| Thr99Lys | CCTCCAATAGGAACAGCAGGTGTGGCCCTTGTGCTTGTGAGAGG | 5978 |
| ACC-AAA | GAAGAGCTGAGTCCCTTTGCCACCGCCGAGTATGACGGCCGCGA | |
| | CCTCGTTCGGATCGGCGTAATTCCTGCGGAAGG | |
| | CGGTGGCAAAGGGACTC | 5979 |
| | GAGTCCCTTTGCCACCG | 5980 |
| Increased Starch | CAAGCACAAGGGCCACACCTGCTGTTCCTATTGGAGGATGTTACA | 5981 |
| ADPGPP | GGCTCATCGATATTCTCATGAGCAACTGCTTCAATAGTGGCATCAA | |
| Triticum aestivum | CAAGATATTCGTCATGACGCAGTTCAACTC | |
| Pro127Leu | GAGTTGAACTGCGTCATGACGAATATCTTGTTGATGCCACTATTGA | 5982 |
| CCC-CTC | AGCAGTTGCTCATGAGAATATCGATGAGCCTGTAACATCCTCCAA | |
| | TAGGAACAGCAGGTGTGGCCCTTGTGCTTG | |
| | CGATATTCTCATGAGCA | 5983 |
| | TGCTCATGAGAATATCG | 5984 |
| Increased Starch | TGACGCAGTTCAACTCGGCCTCTCTTAATCGTCACATTCACCGCA | 5985 |
| ADPGPP | CCTACCTCGGCGGGAATATCAATTTCACTGATGGATCTGTTGAGG | |
| Triticum aestivum | TATTGGCCGCGACGCAAATGCCCGGGGAGGC | |
| Gly162Asn | GCCTCCCCGGGCATTTGCGTCGCGGCCAATACCTCAACAGATCC | 5986 |
| GGA-AAT | ATCAGTGAAATTGATATTCCCGCCGAGGTAGGTGCGGTGAATGTG | |
| | ACGATTAAGAGAGGCCGAGTTGAACTGCGTCA | |
| | CGGCGGGAATATCAATT | 5987 |
| | AATTGATATTCCCGCCG | 5988 |
| Increased Starch | TGACGCAGTTCAACTCGGCCTCTCTTAATCGTCACATTCACCGCA | 5989 |
| ADPGPP | CCTACCTCGGCGGGAACATCAATTTCACTGATGGATCTGTTGAGG | |
| Triticum aestivum | TATTGGCCGCGACGCAAATGCCCGGGGAGGC | |
| Gly162Asn | GCCTCCCCGGGCATTTGCGTCGCGGCCAATACCTCAACAGATCC | 5990 |
| GGA-AAC | ATCAGTGAAATTGATGTTCCCGCCGAGGTAGGTGCGGTGAATGTG | |
| | ACGATTAAGAGAGGCCGAGTTGAACTGCGTCA | |
| | CGGCGGGAACATCAATT | 5991 |
| | AATTGATGTTCCCGCCG | 5992 |
| Increased Starch | CTTTTCGGAGGAATTATGCTGATCCTAATGAAGTCGCTGCCGTCA | 5993 |
| ADPGPP | TTTTGGGTGGTGGTAAAGGGACTCAGCTTTTCCCTCTCACAAGCA | |
| Zea mays | CAAGGGCCACCCCTGCTGTTCCTATTGGAGG | |
| Thr96Lys | CCTCCAATAGGAACAGCAGGGGTGGCCCTTGTGCTTGTGAGAGG | 5994 |
| ACC-AAA | GAAAAGCTGAGTCCCTTTACCACCACCCAAAATGACGGCAGCGAC | |
| | TTCATTAGGATCAGCATAATTCCTCCGAAAAG | |
| | TGGTGGTAAAGGGACTC | 5995 |
| | GAGTCCCTTTACCACCA | 5996 |
| Increased Starch | CAAGCACAAGGGCCACCCCTGCTGTTCCTATTGGAGGATGTTACA | 5997 |
| ADPGPP | GGCTTATTGATATCCTCATGAGCAACTGTTTCAACAGTGGCATAAA | |
| Zea mays | CAAGATATTTGTTATGACTCAGTTCAACTC | |
| Pro124Leu | GAGTTGAACTGAGTCATAACAAATATCTTGTTTATGCCACTGTTGA | 5998 |
| CCC-CTC | AACAGTTGCTCATGAGGATATCAATAAGCCTGTAACATCCTCCAAT | |
| | AGGAACAGCAGGGGTGGCCCTTGTGCTTG | |
| | TGATATCCTCATGAGCA | 5999 |
| | TGCTCATGAGGATATCA | 6000 |
| Increased Starch | TGACTCAGTTCAACTCAGCTTCTCTTAACCGTCACATTCATCGTAC | 6001 |
| ADPGPP | CTATCTTGGTGGGAATATCAACTTCACTGATGGATCTGTTGAGGT | |
| Zea mays | GCTGGCTGCAACACAAATGCCTGGGGAGGC | |
| Gly159Asn | GCCTCCCCAGGCATTTGTGTTGCAGCCAGCACCTCAACAGATCCA | 6002 |
| GGG-AAT | TCAGTGAAGTTGATATTCCCACCAAGATAGGTACGATGAATGTGA | |
| | CGGTTAAGAGAAGCTGAGTTGAACTGAGTCA | |
| | TGGTGGGAATATCAACT | 6003 |
| | AGTTGATATTCCCACCA | 6004 |
| Increased Starch | TGACTCAGTTCAACTCAGCTTCTCTTAACCGTCACATTCATCGTAC | 6005 |
| ADPGPP | CTATCTTGGTGGGAACATCAACTTCACTGATGGATCTGTTGAGGT | |
| Zea mays | GCTGGCTGCAACACAAATGCCTGGGGAGGC | |
| Gly159Asn | GCCTCCCCAGGCATTTGTGTTGCAGCCAGCACCTCAACAGATCCA | 6006 |
| GGG-AAC | TCAGTGAAGTTGATGTTCCCACCAAGATAGGTACGATGAATGTGA | |
| | CGGTTAAGAGAAGCTGAGTTGAACTGAGTCA | |
| | TGGTGGGAACATCAACT | 6007 |
| | AGTTGATGTTCCCACCA | 6008 |
| Increased Starch | CTTGAGAGGCAAAAGAAGGGCGATGCAAGGACAGTAGTAGCAAT | 6009 |
| ADPGPP | CATTCTAGGAGGGGGAAAGGGAACTCGTCTTTTCCCCCTCACCAA | |
| Solanum tuberosum | ACGTCGTGCTAAGCCTGCCGTTCCAATGGGAG | |
| Ala58Lys | CTCCCATTGGAACGGCAGGCTTAGCACGACGTTTGGTGAGGGGG | 6010 |
| GCG-AAG | AAAAGACGAGTTCCCTTTCCCCCTCCTAGAATGATTGCTACTACTG | |
| | TCCTTGCATCGCCCTTCTTTTGCCTCTCAAG | |
| | GAGGGGGAAAGGGAACT | 6011 |
| | AGTTCCCTTTCCCCCTC | 6012 |
| Increased Starch | CCAAACGTCGTGCTAAGCCTGCCGTTCCAATGGGAGGAGCATATA | 6013 |
| ADPGPP | GGCTAATTGATGTACTAATGAGCAACTGTATTAACAGTGGCATCAA | |
| Solanum tuberosum | CAAAGTATACATTCTCACTCAATTCAACTC | |
| Pro86Leu | GAGTTGAATTGAGTGAGAATGTATACTTTGTTGATGCCACTGTTAA | 6014 |
| CCA-CTA | TACAGTTGCTCATTAGTACATCAATTAGCCTATATGCTCCTCCCAT | |
| | TGGAACGGCAGGCTTAGCACGACGTTTGG | |
| | TGATGTACTAATGAGCA | 6015 |
| | TGCTCATTAGTACATCA | 6016 |
| Increased Starch | CTCAATTCAACTCAGCCTCACTTAACAGGCATATAGCTCGTGCTTA | 6017 |
| ADPGPP | CAACTTTGGCAATAATGTCACATTCGAGAGTGGCTATGTCGAGGT | |
| Solanum tuberosum | CTTAGCAGCAACTCAAACACCAGGTGAATT | |
| Gly122Asn | AATTCACCTGGTGTTTGAGTTGCTGCTAAGACCTCGACATAGCCA | 6018 |
| GGG-AAT | CTCTCGAATGTGACATTATTGCCAAAGTTGTAAGCACGAGCTATAT | |
| | GCCTGTTAAGTGAGGCTGAGTTGAATTGAG | |
| | TGGCAATAATGTCACAT | 6019 |
| | ATGTGACATTATTGCCA | 6020 |
| Increased Starch | CTCAATTCAACTCAGCCTCACTTAACAGGCATATAGCTCGTGCTTA | 6021 |
| ADPGPP | CAACTTTGGCAATAACGTCACATTCGAGAGTGGCTATGTCGAGGT | |
| Solanum tuberosum | CTTAGCAGCAACTCAAACACCAGGTGAATT | |
| Gly122Asn | AATTCACCTGGTGTTTGAGTTGCTGCTAAGACCTCGACATAGCCA | 6022 |
| GGG-AAC | CTCTCGAATGTGACGTTATTGCCAAAGTTGTAAGCACGAGCTATAT | |
| | GCCTGTTAAGTGAGGCTGAGTTGAATTGAG | |
| | TGGCAATAACGTCACAT | 6023 |
| | ATGTGACGTTATTGCCA | 6024 |
| Increased Starch | TATTTGAATCTCCAAAAGCTGACCCAAAAAATGTGGCTGCAATTGT | 6025 |
| ADPGPP | GCTGGGTGGTGGTAAAGGGACTCGCCTCTTTCCTCTTACTAGCAG | |
| Beta vulgaris | GAGAGCTAAGCCAGCAGTGCCAATTGGAGG | |
| Ala98Lys | CCTCCAATTGGCACTGCTGGCTTAGCTCTCCTGCTAGTAAGAGGA | 6026 |
| GCT-AAA | AAGAGGCGAGTCCCTTTACCACCACCCAGCACAATTGCAGCCACA | |
| | TTTTTTGGGTCAGCTTTTGGAGATTCAAATA | |
| | TGGTGGTAAAGGGACTC | 6027 |
| | GAGTCCCTTTACCACCA | 6028 |
| Increased Starch | TATTTGAATCTCCAAAAGCTGACCCAAAAAATGTGGCTGCAATTGT | 6029 |
| ADPGPP | GCTGGGTGGTGGTAACGGGACTCGCCTCTTTCCTCTTACTAGCAG | |
| Beta vulgaris | GAGAGCTAAGCCAGCAGTGCCAATTGGAGG | |
| Ala98Lys | CCTCCAATTGGCACTGCTGGCTTAGCTCTCCTGCTAGTAAGAGGA | 6030 |
| GCT-AAC | AAGAGGCGAGTCCCGTTACCACCACCCAGCACAATTGCAGCCAC | |
| | ATTTTTTGGGTCAGCTTTTGGAGATTCAAATA | |
| | TGGTGGTAACGGGACTC | 6031 |
| | GAGTCCCGTTACCACCA | 6032 |
| Increased Starch | CTAGCAGGAGAGCTAAGCCAGCAGTGCCAATTGGAGGGTGTTAC | 6033 |
| ADPGPP | AGGCTGATTGATGTGCTTATGAGCAACTGCATCAACAGTGGCATT | |
| Beta vulgaris | AGAAAGATTTTCATTCTTACCCAGTTCAATTC | |
| Pro126Leu | GAATTGAACTGGGTAAGAATGAAAATCTTTCTAATGCCACTGTTGA | 6034 |
| CCT-CTT | TGCAGTTGCTCATAAGCACATCAATCAGCCTGTAACACCCTCCAA | |
| | TTGGCACTGCTGGCTTAGCTCTCCTGCTAG | |
| | TGATGTGCTTATGAGCA | 6035 |
| | TGCTCATAAGCACATCA | 6036 |
| Increased Starch | CCCAGTTCAATTCGTTTTCGCTTAATCGTCATCTTGCTCGAACCTA | 6037 |
| ADPGPP | TAATTTTGGAGATAATGTGAATTTTGGGGATGGCTTTGTGGAGGTT | |
| Beta vulgaris | TTTGCTGCTACACAAACACCTGGAGAATC | |
| Gly162Asn | GATTCTCCAGGTGTTTGTGTAGCAGCAAAAACCTCCACAAAGCCA | 6038 |
| GGT-AAT | TCCCCAAAATTCACATTATCTCCAAAATTATAGGTTCGAGCAAGAT | |
| | GACGATTAAGCGAAAACGAATTGAACTGGG | |
| | TGGAGATAATGTGAATT | 6039 |
| | AATTCACATTATCTCCA | 6040 |
| Increased Starch | CCCAGTTCAATTCGTTTTCGCTTAATCGTCATCTTGCTCGAACCTA | 6041 |
| ADPGPP | TAATTTTGGAGATAACGTGAATTTTGGGGATGGCTTTGTGGAGGT | |
| Beta vulgaris | TTTTGCTGCTACACAAACACCTGGAGAATC | |
| Gly162Asn | GATTCTCCAGGTGTTTGTGTAGCAGCAAAAACCTCCACAAAGCCA | 6042 |
| GGT-AAC | TCCCCAAAATTCACGTTATCTCCAAAATTATAGGTTCGAGCAAGAT | |
| | GACGATTAAGCGAAAACGAATTGAACTGGG | |
| | TGGAGATAACGTGAATT | 6043 |
| | AATTCACGTTATCTCCA | 6044 |

[0271] TABLE 39

Oligonucleotides to produce plants with waxy starch
Genome-Altering Oligos Conferring Tncreased Starch

| Phenotype, Gene, | | |
|---|---|---|
| Plant & Targeted | | SEQ ID |
| Alteration | Altering Oligos | NO: |
| Waxy starch | GAATCCAGGTAAACGGGTAGTTCATAATGGCAACTGTGACTGCTT | 6045 |
| GBSS | CTTCTAACTTTGTGTGAAGAACTTCACTTTTCAACAATCATGGTGCT | |
| Arabidopsis thaliana | CTTCATGCTCTGATGTCGCTCAGATTAC | |
| Ser12Term | GTAATCTGAGCGACATCAGAGCATGAAGAAGCACCATGATTGTTG | 6046 |
| TCA-TGA | AAAAGTGAAGTTCTTCACACAAAGTTAGAAGAAGCAGTCACAGTTG | |
| | CCATTATGAACTACCCGTTTACCTGGATTC | |
| | CTTTGTGTGAAGAACTT | 6047 |
| | AAGTTCTTCACACAAAG | 6048 |
| Waxy starch | ATCCAGGTAAACGGGTAGTTCATAATGGCAACTGTGACTGCTTCTT | 6049 |
| GBSS | CTAACTTTGTGTCATGAACTTCACTTTTCAACAATCATGGTGCTTCT | |
| Arabidopsis thaliana | TCATGCTCTGATGTCGCTCAGATTACCT | |
| Arg13Term | AGGTAATCTGAGCGACATCAGAGCATGAAGAAGCACCATGATTGT | 6050 |
| AGA-TGA | TGAAAAGTGAAGTTCATGACACAAAGTTAGAAGAAGCAGTCACAGT | |
| | TGCCATTATGAACTACCCGTTTACCTGGAT | |
| | TTGTGTCATGAACTTCA | 6051 |
| | TGAAGTTCATGACACAA | 6052 |
| Waxy starch | TAAACGGGTAGTTCATAATGGCAACTGTGACTGCTTCTTCTAACTT | 6053 |
| GBSS | TGTGTCAAGAACTTGACTTTTCAACAATCATGGTGCTTCTTCATGCT | |
| Arabidopsis thaliana | CTGATGTCGCTCAGATTACCTTAAAAGG | |
| Ser15Term | CCTTTTAAGGTAATCTGAGCGACATCAGAGCATGAAGAAGCACCAT | 6054 |
| TCA-TGA | GATTGTTGAAAAGTCAAGTTCTTGACACAAAGTTAGAAGAAGCAGT | |
| | CACAGTTGCCATTATGAACTACCCGTTTA | |
| | AAGAACTTGACTTTTCA | 6055 |
| | TGAAAAGTCAAGTTCTT | 6056 |
| Waxy starch | TGACTGCTTCTTCTAACTTTGTGTCAAGAACTTCACTTTTCAACAAT | 6057 |
| GBSS | CATGGTGCTTCTTGATGCTCTGATGTCGCTCAGATTACCTTAAAAG | |
| Arabidopsis thaliana | GCCAATCCTTGACTCATTGTGGGTTAAG | |
| Ser24Term | CTTAACCCACAATGAGTCAAGGATTGGCCTTTTAAGGTAATCTGAG | 6058 |
| TCA-TGA | CGACATCAGAGCATCAAGAAGCACCATGATTGTTGAAAAGTGAAG | |
| | TTCTTGACACAAAGTTAGAAGAAGCAGTCA | |
| | TGCTTCTTGATGCTCTG | 6059 |
| | CAGAGCATCAAGAAGCA | 6060 |
| Waxy starch | TGCTTCTTCTAACTTTGTGTCAAGAACTTCACTTTTCAACAATCATG | 6061 |
| GBSS | GTGCTTCTTCATGATCTGATGTCGCTCAGATTACCTTAAAAGGCCA | |
| Arabidopsis thaliana | ATCCTTGACTCATTGTGGGTTAAGGTCA | |
| Cys25Term | TGACCTTAACCCACAATGAGTCAAGGATTGGCCTTTTAAGGTAATC | 6062 |
| TGC-TGA | TGAGCGACATCAGATCATGAAGAAGCACCATGATTGTTGAAAAGT | |
| | GAAGTTCTTGACACAAAGTTAGAAGAAGCA | |
| | TCTTCATGATCTGATGT | 6063 |
| | ACATCAGATCATGAAGA | 6064 |
| Waxy starch | GTAACAGCTTCACAGTTGGTGTCACATGTCCATGGTGGAGCAACG | 6065 |
| GBSS | TCTTCACCGGATACTTAAACAAACTTGGCCCAGGTTGGCCTCAGG | |
| Antirrhinum majus | AACCAGCAATTCACTCACAATGGGTTGAGAT | |
| Lys24Term | ATCTCAACCCATTGTGAGTGAATTGCTGGTTCCTGAGGCCAACCTG | 6066 |
| AAA-TAA | GGCCAAGTTTGTTTAAGTATCCGGTGAAGACGTTGCTCCACCATG | |
| | GACATGTGACACCAACTGTGAAGCTGTTAC | |
| | CGGATACTTAAACAAAC | 6067 |
| | GTTTGTTTAAGTATCCG | 6068 |
| Waxy starch | CACAGTTGGTGTCACATGTCCATGGTGGAGCAACGTCTTCACCGG | 6069 |
| GBSS | ATACTAAAACAAACTAGGCCCAGGTTGGCCTCAGGAACCAGCAAT | |
| Antirrhinum majus | TCACTCACAATGGGTTGAGATCAATAAACAT | |
| Leu21Term | ATGTTTATTGATCTCAACCCATTGTGAGTGAATTGCTGGTTCCTGA | 6070 |
| TTG-TAG | GGCCAACCTGGGCCTAGTTTGTTTTAGTATCCGGTGAAGACGTTG | |
| | CTCCACCATGGACATGTGACACCAACTGTG | |
| | AACAAACTAGGCCCAGG | 6071 |
| | CCTGGGCCTAGTTTGTT | 6072 |
| Waxy starch | TTGGTGTCACATGTCCATGGTGGAGCAACGTCTTCACCGGATACT | 6073 |
| GBSS | AAAACAAACTTGGCCTAGGTTGGCCTCAGGAACCAGCAATTCACT | |
| Antirrhinum majus | CACAATGGGTTGAGATCAATAAACATGGTTG | |
| Gln29Term | CAACCATGTTTATTGATCTCAACCCATTGTGAGTGAATTGCTGGTT | 6074 |
| CAG-TAG | CCTGAGGCCAACCTAGGCCAAGTTTGTTTTAGTATCCGGTGAAGA | |
| | CGTTGCTCCACCATGGACATGTGACACCAA | |
| | ACTTGGCCTAGGTTGGC | 6075 |
| | GCCAACCTAGGCCAAGT | 6076 |
| Waxy starch | GGTGGAGCAACGTCTTCACCGGATACTAAAACAAACTTGGCCCAG | 6077 |
| GBSS | GTTGGCCTCAGGAACTAGCAATTCACTCACAATGGGTTGAGATCA | |
| Antirrhinum majus | ATAAACATGGTTGATAAGCTTCAAATGAGGA | |
| Gln35Term | TCCTCATTTGAAGCTTATCAACCATGTTTATTGATCTCAACCCATTG | 6078 |
| CAG-TAG | TGAGTGAATTGCTAGTTCCTGAGGCCAACCTGGGCCAAGTTTGTTT | |
| | TAGTATCCGGTGAAGACGTTGCTCCACC | |
| | TCAGGAACTAGCAATTC | 6079 |
| | GAATTGCTAGTTCCTGA | 6080 |
| Waxy starch | GGAGCAACGTCTTCACCGGATACTAAAACAAACTTGGCCCAGGTT | 6081 |
| GBSS | GGCCTCAGGAACCAGTAATTCACTCACAATGGGTTGAGATCAATAA | |
| Antirrhinum majus | ACATGGTTGATAAGCTTCAAATGAGGAACA | |
| Gln36Term | TGTTCCTCATTTGAAGCTTATCAACCATGTTTATTGATCTCAACCCA | 6082 |
| CAA-TAA | TTGTGAGTGAATTACTGGTTCCTGAGGCCAACCTGGGCCAAGTTT | |
| | GTTTTAGTATCCGGTGAAGACGTTGCTCC | |
| | GGAACCAGTAATTCACT | 6083 |
| | AGTGAATTACTGGTTCC | 6084 |
| Waxy starch | GTGATGGCGACTATAACTGCCTCACACTTTGTTTCTCATGTCTGTG | 6085 |
| GBSS | GGGGTGCCACTTCTTGAGAATCAAAAGTGGGGTTGGGTCAATTAG | |
| Ipomoea batatas | CCCTGAGGAGCCAAGCTGTGACTCACAATG | |
| Gly20Term | CATTGTGAGTCACAGCTTGGCTCCTCAGGGCTAATTGACCCAACC | 6086 |
| GGA-TGA | CCACTTTTGATTCTCAAGAAGTGGCACCCCCACAGACATGAGAAA | |
| | CAAAGTGTGAGGCAGTTATAGTCGCCATCAC | |
| | CCACTTCTTGAGAATCA | 6087 |
| | TGATTCTCAAGAAGTGG | 6088 |
| Waxy starch | ATGGCGACTATAACTGCCTCACACTTTGTTTCTCATGTCTGTGGGG | 6089 |
| GBSS | GTGCCACTTCTGGATAATCAAAAGTGGGGTTGGGTCAATTAGCCC | |
| Ipomoea batatas | TGAGGAGCCAAGCTGTGACTCACAATGGGT | |
| Glu21Term | ACCCATTGTGAGTCACAGCTTGGCTCCTCAGGGCTAATTGACCCA | 6090 |
| GAA-TAA | ACCCCACTTTTGATTATCCAGAAGTGGCACCCCCACAGACATGAG | |
| | AAACAAAGTGTGAGGCAGTTATAGTCGCCAT | |
| | CTTCTGGATAATCAAAA | 6091 |
| | TTTTGATTATCCAGAAG | 6092 |
| Waxy starch | CGACTATAACTGCCTCACACTTTGTTTCTCATGTCTGTGGGGGTGC | 6093 |
| GBSS | CACTTCTGGAGAATGAAAAGTGGGGTTGGGTCAATTAGCCCTGAG | |
| Ipomoea batatas | GAGCCAAGCTGTGACTCACAATGGGTTGAG | |
| Ser22Term | CTCAACCCATTGTGAGTCACAGCTTGGCTCCTCAGGGCTAATTGA | 6094 |
| TCA-TGA | CCCAACCCCACTTTTCATTCTCCAGAAGTGGCACCCCCACAGACAT | |
| | GAGAAACAAAGTGTGAGGCAGTTATAGTCG | |
| | TGGAGAATGAAAAGTGG | 6095 |
| | CCACTTTTCATTCTCCA | 6096 |
| Waxy starch | ACTATAACTGCCTCACACTTTGTTTCTCATGTCTGTGGGGGTGCCA | 6097 |
| GBSS | CTTCTGGAGAATCATAAGTGGGGTTGGGTCAATTAGCCCTGAGGA | |
| Ipomoea batatas | GCCAAGCTGTGACTCACAATGGGTTGAGAC | |
| Lys23Term | GTCTCAACCCATTGTGAGTCACAGCTTGGCTCCTCAGGGCTAATT | 6098 |
| AAA-TAA | GACCCAACCCCACTTATGATTCTCCAGAAGTGGCACCCCCACAGA | |
| | CATGAGAAACAAAGTGTGAGGCAGTTATAGT | |
| | GAGAATCATAAGTGGGG | 6099 |
| | CCCCACTTATGATTCTC | 6100 |
| Waxy starch | CCTCACACTTTGTTTCTCATGTCTGTGGGGGTGCCACTTCTGGAGA | 6101 |
| GBSS | ATCAAAAGTGGGGTAGGGTCAATTAGCCCTGAGGAGCCAAGCTGT | |
| Ipomoea batatas | GACTCACAATGGGTTGAGACCTGTGAACAA | |
| Leu26Term | TTGTTCACAGGTCTCAACCCATTGTGAGTCACAGCTTGGCTCCTCA | 6102 |
| TTG-TAG | GGGCTAATTGACCCTACCCCACTTTTGATTCTCCAGAAGTGGCACC | |
| | CCCACAGACATGAGAAACAAAGTGTGAGG | |
| | AGTGGGGTAGGGTCAAT | 6103 |
| | ATTGACCCTACCCCACT | 6104 |
| Waxy starch | CATCGGCGATTGTTGCTCCTTACTGCTCTCTCACAGAATGGCAACG | 6105 |
| GBSS | GTGACGGGGTCTTAGGTGGTGTCGAGAAGCGCGTGCTTCAATTCC | |
| Astragalus | CAGGGAAGAACAGAAGCCAAAGTGAATTCA | |
| membranaeus | TGAATTCACTTTGGCTTCTGTTCTTCCCTGGGAATTGAAGCACGCG | 6106 |
| Tyr8Term | CTTCTCGACACCACCTAAGACCCCGTCACCGTTGCCATTCTGTGA | |
| TAT-TAG | GAGAGCAGTAAGGAGCAACAATCGCCGATG | |
| | GGGTCTTAGGTGGTGTC | 6107 |
| | GACACCACCTAAGACCC | 6108 |
| Waxy starch | ATTGTTGCTCCTTACTGCTCTCTCACAGAATGGCAACGGTGACGG | 6109 |
| GBSS | GGTCTTATGTGGTGTAGAGAAGCGCGTGCTTCAATTCCCAGGGAA | |
| Astragalus | GAACAGAAGCCAAAGTGAATTCACCTCAGAA | |
| membranaeus | TTCTGAGGTGAATTCACTTTGGCTTCTGTTCTTCCCTGGGAATTGA | 6110 |
| Ser11Term | AGCACGCGCTTCTCTACACCACATAAGACCCCGTCACCGTTGCCA | |
| TCG-TAG | TTCTGTGAGAGAGCAGTAAGGAGCAACAAT | |
| | TGTGGTGTAGAGAAGCG | 6111 |
| | CGCTTCTCTACACCACA | 6112 |
| Waxy starch | TGTTGCTCCTTACTGCTCTCTCACAGAATGGCAACGGTGACGGGG | 6113 |
| GBSS | TCTTATGTGGTGTCGTGAAGCGCGTGCTTCAATTCCCAGGGAAGA | |
| Astragalus | ACAGAAGCCAAAGTGAATTCACCTCAGAAGA | |
| membranaeus | TCTTCTGAGGTGAATTCACTTTGGCTTCTGTTCTTCCCTGGGAATT | 6114 |
| Arg12Term | GAAGCACGCGCTTCACGACACCACATAAGACCCCGTCACCGTTGC | |
| AGA-TGA | CATTCTGTGAGAGAGCAGTAAGGAGCAACA | |
| | TGGTGTCGTGAAGCGCG | 6115 |
| | CGCGCTTCACGACACCA | 6116 |
| Waxy starch | ACTGCTCTCTCACAGAATGGCAACGGTGACGGGGTCTTATGTGGT | 6117 |
| GBSS | GTCGAGAAGCGCGTGATTCAATTCCCAGGGAAGAACAGAAGCCAA | |
| Astragalus | AGTGAATTCACCTCAGAAGATAAATCTCAAT | |
| membranaeus | ATTGAGATTTATCTTCTGAGGTGAATTCACTTTGGCTTCTGTTCTTC | 6118 |
| Cys15Term | CCTGGGAATTGAATCACGCGCTTCTCGACACCACATAAGACCCCG | |
| TGC-TGA | TCACCGTTGCCATTCTGTGAGAGAGCAGT | |
| | AGCGCGTGATTCAATTC | 6119 |
| | GAATTGAATCACGCGCT | 6120 |
| Waxy starch | CACAGAATGGCAACGGTGACGGGGTCTTATGTGGTGTCGAGAAG | 6121 |
| GBSS | CGCGTGCTTCAATTCCTAGGGAAGAACAGAAGCCAAAGTGAATTC | |
| Astragalus | ACCTCAGAAGATAAATCTCAATAGCCAAGCAT | |
| membranaeus | ATGCTTGGCTATTGAGATTTATCTTCTGAGGTGAATTCACTTTGGCT | 6122 |
| Gln19Term | TCTGTTCTTCCCTAGGAATTGAAGCACGCGCTTCTCGACACCACAT | |
| CAG-TAG | AAGACCCCGTCACCGTTGCCATTCTGTG | |
| | TCAATTCCTAGGGAAGA | 6123 |
| | TCTTCCCTAGGAATTGA | 6124 |
| Waxy starch | TGTAGCTTGGTAGATTCCCCTTTTTGTAGACCACACATCACATGGC | 6125 |
| GBSS | AAGCATCACAGCTTGACACCACTTTGTGTCAAGAAGCCAAACTTCA | |
| Solanum tuberosum | CTAGACACCAAATCAACCTTGTCACAGAT | |
| Ser7Term | ATCTGTGACAAGGTTGATTTGGTGTCTAGTGAAGTTTGGCTTCTTG | 6126 |
| TCA-TGA | ACACAAAGTGGTGTCAAGCTGTGATGCTTGCCATGTGATGTGTGG | |
| | TCTACAAAAAGGGGAATCTACCAAGCTACA | |
| | CACAGCTTGACACCACT | 6127 |
| | AGTGGTGTCAAGCTGTG | 6128 |
| Waxy starch | TCCCCTTTTTGTAGACCACACATCACATGGCAAGCATCACAGCTTC | 6129 |
| GBSS | ACACCACTTTGTGTGAAGAAGCCAAACTTCACTAGACACCAAATCA | |
| Solanum tuberosum | ACCTTGTCACAGATAGGACTCAGGAACCA | |
| Ser12Term | TGGTTCCTGAGTCCTATCTGTGACAAGGTTGATTTGGTGTCTAGTG | 6130 |
| TCA-TGA | AAGTTTGGCTTCTTCACACAAAGTGGTGTGAAGCTGTGATGCTTGC | |
| | CATGTGATGTGTGGTCTACAAAAAGGGGA | |
| | CTTTGTGTGAAGAAGCC | 6131 |
| | GGCTTCTTCACACAAAG | 6132 |
| Waxy starch | CCCTTTTTGTAGACCACACATCACATGGCAAGCATCACAGCTTCAC | 6133 |
| GBSS | ACCACTTTGTGTCATGAAGCCAAACTTCACTAGACACCAAATCAAC | |
| Solanum tuberosum | CTTGTCACAGATAGGACTCAGGAACCATA | |
| Arg13Term | TATGGTTCCTGAGTCCTATCTGTGACAAGGTTGATTTGGTGTCTAG | 6134 |
| AGA-TGA | TGAAGTTTGGCTTCATGACACAAAGTGGTGTGAAGCTGTGATGCTT | |
| | GCCATGTGATGTGTGGTCTACAAAAAGGG | |
| | TTGTGTCATGAAGCCAA | 6135 |
| | TTGGCTTCATGACACAA | 6136 |
| Waxy starch | TTGTAGACCACACATCACATGGCAAGCATCACAGCTTCACACCACT | 6137 |
| GBSS | TTGTGTCAAGAAGCTAAACTTCACTAGACACCAAATCAACCTTGTC | |
| Solanum tuberosum | ACAGATAGGACTCAGGAACCATACTCTGA | |
| Gln15Term | TCAGAGTATGGTTCCTGAGTCCTATCTGTGACAAGGTTGATTTGGT | 6138 |
| CAA-TAA | GTCTAGTGAAGTTTAGCTTCTTGACACAAAGTGGTGTGAAGCTGTG | |
| | ATGCTTGCCATGTGATGTGTGGTCTACAA | |
| | CAAGAAGCTAAACTTCA | 6139 |
| | TGAAGTTTAGCTTCTTG | 6140 |
| Waxy starch | CCACACATCACATGGCAAGCATCACAGCTTCACACCACTTTGTGTC | 6141 |
| GBSS | AAGAAGCCAAACTTGACTAGACACCAAATCAACCTTGTCACAGATA | |
| Solanum tuberosum | GGACTCAGGAACCATACTCTGACTCACAA | |
| Ser17Term | TTGTGAGTCAGAGTATGGTTCCTGAGTCCTATCTGTGACAAGGTTG | 6142 |
| TCA-TGA | ATTTGGTGTCTAGTCAAGTTTGGCTTCTTGACACAAAGTGGTGTGA | |
| | AGCTGTGATGCTTGCCATGTGATGTGTGG | |
| | CCAAACTTGACTAGACA | 6143 |
| | TGTCTAGTCAAGTTTGG | 6144 |
| Waxy starch | GTCGATCACTCTTCTCTCACCGCCGAAACAGATTTTGACACAATAAA | 6145 |
| GBSS | TGGCAACAATAACGTGATCTTCAATGCCGACGAGAACCGCGTGCT | |
| Pisum sativum | TCAATTACCAAGGAAGATCAGCAGAGTCTA | |
| Gly6Term | TAGACTCTGCTGATCTTCCTTGGTAATTGAAGCACGCGGTTCTCGT 6146 | |
| GGA-TGA | CGGCATTGAAGATCACGTTATTGTTGCCATTTTTGTGTCAAAATCT | |
| | GTTTCGGCGGTGAGAGAAGAGTGATCGAC | |
| | CAATAACGTGATCTTCA | 6147 |
| | TGAAGATCACGTTATTG | 6148 |
| Waxy starch | ACTCTTCTCTCACCGCCGAAACAGATTTTGACACAAAAATGGCAAC | 6149 |
| GBSS | AATAACGGGATCTTGAATGCCGACGAGAACCGCGTGCTTCAATTA | |
| Pisum sativum | CCAAGGAAGATCAGCAGAGTCTAAACTGAA | |
| Ser8Term | TTCAGTTTAGACTCTGCTGATCTTCCTTGGTAATTGAAGCACGCGG | 6150 |
| TCA-TGA | TTCTCGTCGGCATTCAAGATCCCGTTATTGTTGCCATTTTTGTGTCA | |
| | AAATCTGTTTCGGCGGTGAGAGAAGAGT | |
| | GGGATCTTGAATGCCGA | 6151 |
| | TCGGCATTCAAGATCCC | 6152 |
| Waxy starch | ACCGCCGAAACAGATTTTGACACAAAAATGGCAACAATAACGGGA | 6153 |
| GBSS | TCTTCAATGCCGACGTGAACCGCGTGCTTCAATTACCAAGGAAGA | |
| Pisum sativum | TCAGCAGAGTCTAAACTGAATTTGCCTCAGA | |
| Arg12Term | TCTGAGGCAAATTCAGTTTAGACTCTGCTGATCTTCCTTGGTAATT | 6154 |
| AGA-TGA | GAAGCACGCGGTTCACGTCGGCATTGAAGATCCCGTTATTGTTGC | |
| | CATTTTTGTGTCAAAATCTGTTTCGGCGGT | |
| | TGCCGACGTGAACCGCG | 6155 |
| | CGCGGTTCACGTCGGCA | 6156 |
| Waxy starch | AGATTTTGACACAAAAATGGCAACAATAACGGGATCTTCAATGCCG | 6157 |
| GBSS | ACGAGAACCGCGTGATTCAATTACCAAGGAAGATCAGCAGAGTCT | |
| Pisum sativum | AAACTGAATTTGCCTCAGATACACTTCAAT | |
| Cys18Term | ATTGAAGTGTATCTGAGGCAAATTCAGTTTAGACTCTGCTGATCTT | 6158 |
| TGC-TGA | CCTTGGTAATTGAATCACGCGGTTCTCGTCGGCATTGAAGATCCC | |
| | GTTATTGTTGCCATTTTTGTGTCAAAATCT | |
| | ACCGCGTGATTCAATTA | 6159 |
| | TAATTGAATCACGCGGT | 6160 |
| Waxy starch | CACAAAAATGGCAACAATAACGGGATCTTCAATGCCGACGAGAAC | 6161 |
| GBSS | CGCGTGCTTCAATTAGCAAGGAAGATCAGCAGAGTCTAAACTGAA | |
| Pisum sativum | TTTGCCTCAGATACACTTCAATAACAACCAA | |
| Tyr18Term | TTGGTTGTTATTGAAGTGTATCTGAGGCAAATTCAGTTTAGACTCT | 6162 |
| TAC-TAG | GCTGATCTTCCTTGCTAATTGAAGCACGCGGTTCTCGTCGGCATTG | |
| | AAGATCCCGTTATTGTTGCCATTTTTGTG | |
| | TTCAATTAGCAAGGAAG | 6163 |
| | CTTCCTTGCTAATTGAA | 6164 |
| Waxy starch | TCTACACCGGAGAGAGCACCATGGCAACTGTAATAGCTGCACATT | 6165 |
| GBSS | TCGTTTCCAGGAGCTGACACTTGAGCATCCATGCATTAGAGACTAA | |
| Manihot esculenta | GGCTAATAATTTGTCTCACACTGGACCCTG | |
| Ser14Term | CAGGGTCCAGTGTGAGACAAATTATTAGCCTTAGTCTCTAATGCAT | 6166 |
| TCA-TGA | GGATGCTCAAGTGTCAGCTCCTGGAAACGAAATGTGCAGCTATTA | |
| | CAGTTGCCATGGTGCTCTCTCCGGTGTAGA | |
| | CAGGAGCTGACACTTGA | 6167 |
| | TCAAGTGTCAGCTCCTG | 6168 |
| Waxy starch | CCGGAGAGAGCACCATGGCAACTGTAATAGCTGCACATTTCGTTT | 6169 |
| GBSS | CCAGGAGCTCACACTAGAGCATCCATGCATTAGAGACTAAGGCTA | |
| Manihot esculenta | ATAATTTGTCTCACACTGGACCCTGGACCCA | |
| Leu16Term | TGGGTCCAGGGTCCAGTGTGAGACAAATTATTAGCCTTAGTCTCTA | 6170 |
| TTG-TAG | ATGCATGGATGCTCTAGTGTGAGCTCCTGGAAACGAAATGTGCAG | |
| | CTATTACAGTTGCCATGGTGCTCTCTCCGG | |
| | CTCACACTAGAGCATCC | 6171 |
| | GGATGCTCTAGTGTGAG | 6172 |
| Waxy starch | TGGCAACTGTAATAGCTGCACATTTCGTTTCCAGGAGCTCACACTT | 6173 |
| GBSS | GAGCATCCATGCATGAGAGACTAAGGCTT4ATAATTTGTCTCACACT | |
| Manihot esculenta | GGACCCTGGACCCAAACTATCACTCCCAA | |
| Leu21Term | TTGGGAGTGATAGTTTGGGTCCAGGGTCCAGTGTGAGACAAATTA | 6174 |
| TTA-TGA | TTAGCCTTAGTCTCTCATGCATGGATGCTCAAGTGTGAGCTCCTGG | |
| | AAACGAAATGTGCAGCTATTACAGTTGCCA | |
| | CCATGCATGAGAGACTA | 6175 |
| | TAGTCTCTCATGCATGG | 6176 |
| Waxy starch | GCAACTGTAATAGCTGCACATTTCGTTTCCAGGAGCTCACACTTGA | 6177 |
| GBSS | GCATCCATGCATTATAGACTAAGGCTAATAATTTGTCTCACACTGG | |
| Manihot esculenta | ACCCTGGACCCAAACTATCACTCCCAATG | |
| Glu22Term | CATTGGGAGTGATAGTTTGGGTCCAGGGTCCAGTGTGAGACAAAT | 6178 |
| GAG-TAG | TATTAGCCTTAGTCTATAATGCATGGATGCTCAAGTGTGAGCTCCT | |
| | GGAAACGAAATGTGCAGCTATTACAGTTGC | |
| | ATGCATTATAGACTAAG | 6179 |
| | CTTAGTCTATAATGCAT | 6180 |
| Waxy starch | GTAATAGCTGCACATTTCGTTTCCAGGAGCTCACACTTGAGCATCC | 6181 |
| GBSS | ATGCATTAGAGACTTAGGCTAATAATTTGTCTCACACTGGACCCTG | |
| Manihot esculenta | GACCCAAACTATCACTCCCAATGGTTTAA | |
| Lys24Term | TTAAACCATTGGGAGTGATAGTTTGGGTCCAGGGTCCAGTGTGAG | 6182 |
| AAG-TAG | ACAAATTATTAGCCTAAGTCTCTAATGCATGGATGCTCAAGTGTGA | |
| | GCTCCTGGAAACGAAATGTGCAGCTATTAC | |
| | TAGAGACTTAGGCTAAT | 6183 |
| | ATTAGCCTAAGTCTCTA | 6184 |
| Waxy starch | ACAACTCCTCCGTCACCGGTATAAGCATGGCAACGGTATCGATGG | 6185 |
| GBSS | CATCGTGCGTGGCGTGAAAAGGCGCGTGGAGTACAGAGACAAAA | |
| Phaseolus vulgaris | GTGAAATCTTCGGGTCAGATGAGCCTGAACCG | |
| Ser12Term | CGGTTCAGGCTCATCTGACCCGAAGATTTCACTTTTGTCTCTGTAC | 6186 |
| TCA-TGA | TCCACGCGCCTTTTCACGCCACGCACGATGCCATCGATACCGTTG | |
| | CCATGCTTATACCGGTGACGGAGGAGTTGT | |
| | CGTGGCGTGAAAAGGCG | 6187 |
| | CGCCTTTTCACGCCACG | 6188 |
| Waxy starch | CACCGGTATAAGCATGGCAACGGTATCGATGGCATCGTGCGTGGC | 6189 |
| GBSS | GTCAAAAGGCGCGTGAAGTACAGAGACAAAAGTGAAATCTTCGGG | |
| Phaseolus vulgaris | TCAGATGAGCCTGAACCGTCATGAATTGAAA | |
| Trp16Term | TTTCAATTCATGACGGTTCAGGCTCATCTGACCCGAAGATTTCACT | 6190 |
| TGG-TGA | TTTGTCTCTGTACTTCACGCGCCTTTTGACGCCACGCACGATGCCA | |
| | TCGATACCGTTGCCATGCTTATACCGGTG | |
| | GGCGCGTGAAGTACAGA | 6191 |
| | TCTGTACTTCACGCGCC | 6192 |
| Waxy starch | ATAAGCATGGCAACGGTATCGATGGCATCGTGCGTGGCGTCAAAA | 6193 |
| GBSS | GGCGCGTGGAGTACATAGACAAAAGTGAAATCTTCGGGTCAGATG | |
| Phaseolus vulgaris | AGCCTGAACCGTCATGAATTGAAATACGATG | |
| Glu19Term | CATCGTATTTCAATTCATGACGGTTCAGGCTCATCTGACCCGAAGA | 6194 |
| GAG-TAG | TTTCACTTTTGTCTATGTACTCCACGCGCCTTTTGACGCCACGCAC | |
| | GATGCCATCGATACCGTTGCCATGCTTAT | |
| | GGAGTACATAGACAAAA | 6195 |
| | TTTTGTCTATGTACTCC | 6196 |
| Waxy starch | ATGGCAACGGTATCGATGGCATCGTGCGTGGCGTCAAAAGGCGC | 6197 |
| GBSS | GTGGAGTACAGAGACATAAGTGAAATCTTCGGGTCAGATGAGCCT | |
| Phaseolus vulgaris | GAACCGTCATGAATTGAAATACGATGGGTTGA | |
| Lys21Term | TCAACCCATCGTATTTCAATTCATGACGGTTCAGGCTCATCTGACC | 6198 |
| AAA-TAA | CGAAGATTTCACTTATGTCTCTGTACTCCACGCGCCTTTTGACGCC | |
| | ACGCACGATGCCATCGATACCGTTGCCAT | |
| | CAGAGACATAAGTGAAA | 6199 |
| | TTTCACTTATGTCTCTG | 6200 |
| Waxy starch | ACGGTATCGATGGCATCGTGCGTGGCGTCAAAAGGCGCGTGGAG | 6201 |
| GBSS | TACAGAGACAAAAGTGTAATCTTCGGGTCAGATGAGCCTGAACCG | |
| Phaseolus vulgaris | TCATGAATTGAAATACGATGGGTTGAGATCTC | |
| Lys23Term | GAGATCTCAACCCATCGTATTTCAATTCATGACGGTTCAGGCTCAT | 6202 |
| AAA-TAA | CTGACCCGAAGATTACACTTTTGTCTCTGTACTCCACGCGCCTTTT | |
| | GACGCCACGCACGATGCCATCGATACCGT | |
| | CAAAAGTGTAATCTTCG | 6203 |
| | CGAAGATTACACTTTTG | 6204 |
| Waxy starch | GCGCCTAGCTCGAAAAGGTCGTCATTGAGAGGCTGCACCAATGG | 6205 |
| GBSS | GTTCCATTCCTAATTAGTGTTCTTATCAAACAAACAGTGTTGGTTCA | |
| Triticum aestivum | CTGAAACTGTCGCCTCACATCCAATTCCAG | |
| Tyr7Term | CTGGAATTGGATGTGAGGCGACAGTTTCAGTGAACCAACACTGTT | 6206 |
| TAT-TAG | TGTTTGATAAGAACACTAATTAGGAATGGAACCCATTGGTGCAGCC | |
| | TCTCAATGACGACCTTTTCGAGCTAGGCGC | |
| | CCTAATTAGTGTTCTTA | 6207 |
| | TAAGAACACTAATTAGG | 6208 |
| Waxy starch | CCTAGCTCGAAAAGGTCGTCATTGAGAGGCTGCACCAATGGGTTC | 6209 |
| GBSS | CATTCCTAATTATTGATCTTATCAAACAAACAGTGTTGGTTCACTGA | |
| Triticum aestivum | AACTGTCGCCTCACATCCAATTCCAGCAA | |
| Cys8Term | TTGCTGGAATTGGATGTGAGGCGACAGTTTCAGTGAACCAACACT | 6210 |
| TGT-TGA | GTTTGTTTGATAAGATCAATAATTAGGAATGGAACCCATTGGTGCA | |
| | GCCTCTCAATGACGACCTTTTCGAGCTAGG | |
| | AATTATTGATCTTATCA | 6211 |
| | TGATAAGATCAATAATT | 6212 |
| Waxy starch | TCGAAAAGGTCGTCATTGAGAGGCTGCACCAATGGGTTCCATTCC | 6213 |
| GBSS | TAATTATTGTTCTTAGCAAACAAACAGTGTTGGTTCACTGAAACTGT | |
| Triticum aestivum | CGCCTCACATCCAATTCCAGCAATCTTGT | |
| Tyr10Term | ACAAGATTGCTGGAATTGGATGTGAGGCGACAGTTTCAGTGAACC | 6214 |
| TAT-TAG | AACACTGTTTGTTTGCTAAGAACAATAATTAGGAATGGAACCCATT | |
| | GGTGCAGCCTCTCAATGACGACCTTTTCGA | |
| | TGTTCTTAGCAAACAAA | 6215 |
| | TTTGTTTGCTAAGAACA | 6216 |
| Waxy starch | CGAAAAGGTCGTCATTGAGAGGCTGCACCAATGGGTTCCATTCCT | 6217 |
| GBSS | AATTATTGTTCTTATTAAACAAACAGTGTTGGTTCACTGAAACTGTC | |
| Triticum aestivum | GCCTCACATCCAATTCCAGCAATCTTGTA | |
| Gln11Term | TACAAGATTGCTGGAATTGGATGTGAGGCGACAGTTTCAGTGAAC | 6218 |
| CAA-TAA | CAACACTGTTTGTTTAATAAGAACAATAATTAGGAATGGAACCCATT | |
| | GGTGCAGCCTCTCAATGACGACCTTTTCG | |
| | GTTCTTATTAAACAAAC | 6219 |
| | GTTTGTTTAATAAGAAC | 6220 |
| Waxy starch | AGGCTGCACCAATGGGTTCCATTCCTAATTATTGTTCTTATCAAACA | 6221 |
| GBSS | AACAGTGTTGGTTGACTGAAACTGTCGCCTCACATCCAATTCCAGC | |
| Triticum aestivum | AATCTTGTAACAATGAAGTTATGTTCCT | |
| Ser17Term | AGGAACATAACTTCATTGTTACAAGATTGCTGGAATTGGATGTGAG | 6222 |
| TCA-TGA | GCGACAGTTTCAGTCAACCAACACTGTTTGTTTGATAAGAACAATA | |
| | ATTAGGAATGGAACCCATTGGTGCAGCCT | |
| | TGTTGGTTGACTGAAAC | 6223 |
| | GTTTCAGTCAACCAACA | 6224 |
| Waxy starch | CAGCTCGCCACCTCCGGCACCGTCCTCGGCATCACCGACAGGTT | 6225 |
| GBSS | CCGGCGTGCAGGTTTCTAGGGCGTGAGGCCCCGGAGCCCGGCG | |
| Triticum aestivum | GATGCGGCTCTCGGCATGAGGACCGTCGGAGCTA | |
| Gln28Term | TAGCTCCGACGGTCCTCATGCCGAGAGCCGCATCCGCCGGGCTC | 6226 |
| CAG-TAG | CGGGGCCTCACGCCCTAGAAACCTGCACGCCGGAACCTGTCGGT | |
| | GATGCCGAGGACGGTGCCGGAGGTGGCGAGCTG | |
| | CAGGTTTCTAGGGCGTG | 6227 |
| | CACGCCCTAGAAACCTG | 6228 |
| Waxy starch | GGTTTCCAGGGCGTGAGGCCCCGGAGCCCGGCGGATGCGGCTCT | 6229 |
| GBSS | CGGCATGAGGACCGTCTGAGCTAGCGCCGCCCCAACGCAAAGCC | |
| Triticum aestivum | GGAAAGCGCACCGCGGGACCCGGCGGTGCCTCT | |
| Gly46Term | AGAGGCACCGCCGGGTCCCGCGGTGCGCTTTCCGGCTTTGCGTT | 6230 |
| GGA-TGA | GGGGCGGCGCTAGCTCAGACGGTCCTCATGCCGAGAGCCGCATC | |
| | CGCCGGGCTCCGGGGCCTCACGCCCTGGAAACC | |
| | GGACCGTCTGAGCTAGC | 6231 |
| | GCTAGCTCAGACGGTCC | 6232 |
| Waxy starch | CGGAGCCCGGCGGATGCGGCTCTCGGCATGAGGACCGTCGGAG | 6233 |
| GBSS | CTAGCGCCGCCCCAACGTAAAGCCGGAAAGCGCACCGCGGGACC | |
| Triticum aestivum | CGGCGGTGCCTCTCCATGGTGGTGCGCGCCACCG | |
| Gln53Term | CGGTGGCGCGCACCACCATGGAGAGGCACCGCCGGGTCCCGCG | 6234 |
| CAA-TAA | GTGCGCTTTCCGGCTTTACGTTGGGGCGGCGCTAGCTCCGACGG | |
| | TCCTCATGCCGAGAGCCGCATCCGCCGGGCTCCG | |
| | CCCCAACGTAAAGCCGG | 6235 |
| | CCGGCTTTACGTTGGGG | 6236 |
| Waxy starch | GCGGATGCGGCTCTCGGCATGAGGACCGTCGGAGCTAGCGCCGC | 6237 |
| GBSS | CCCAACGCAAAGCCGGTAAGCGCACCGCGGGACCCGGCGGTGC | |
| Triticum aestivum | CTCTCCATGGTGGTGCGCGCCACCGGCAGCGGCG | |
| Lys56Term | CGCCGCTGCCGGTGGCGCGCACCACCATGGAGAGGCACCGCCG | 6238 |
| AAA-TAA | GGTCCCGCGGTGCGCTTACCGGCTTTGCGTTGGGGCGGCGCTAG | |
| | CTCCGACGGTCCTCATGCCGAGAGCCGCATCCGC | |
| | AAAGCCGGTAAGCGCAC | 6239 |
| | TTGCGCTTACCGGCTTT | 6240 |
| Waxy starch | CTCTCCATGGTGGTGCGCGCCACCGGCAGCGGCGGCATGAACCT | 6241 |
| GBSS | CGTGTTCGTCGGCGCCTAGATGGCGCCCTGGAGCAAGACCGGCG | |
| Triticum aestivum | GCCTCGGCGACGTCCTCGGGGGCCTCCCCCCAG | |
| Glu85Term | CTGGGGGGAGGCCCCCGAGGACGTCGCCGAGGCCGCCGGTCTT | 6242 |
| GAG-TAG | GCTCCAGGGCGCCATCTAGGCGCCGACGAACACGAGGTTCATGC | |
| | CGCCGCTGCCGGTGGCGCGCACCACCATGGAGAG | |
| | TCGGCGCCTAGATGGCG | 6243 |
| | CGCCATCTAGGCGCCGA | 6244 |
| Waxy starch | GTCGTCTCTCGCTGCAGGTAGCCACACCCTGCGCGCGCGATGGC | 6245 |
| GBSS | GGCTCTGGTCACGTCGTAGCTCGCCACCTCCGGCACCGTCCTCG | |
| Triticum aestivum | GCATCACCGACAGGTTCCGGCGTGCAGGTTTTC | |
| Gln8Term | GAAAACCTGCACGCCGGAACCTGTCGGTGATGCCGAGGACGGTG | 6246 |
| CAG-TAG | CCGGAGGTGGCGAGCTACGACGTGACCAGAGCCGCCATCGCGC | |
| | GCGCAGGGTGTGGCTACCTGCAGCGAGAGACGAC | |
| | TCACGTCGTAGCTCGCC | 6247 |
| | GGCGAGCTACGACGTGA | 6248 |
| Waxy starch | CAGCTCGCCACCTCCGGCACCGTCCTCGGCATCACCGACAGGTT | 6249 |
| GBSS | CCGGCGTGCAGGTTTTTAGGGTGTGAGGCCCCGGAGCCCGGCAG | |
| Triticum aestivum | ATGCGCCGCTCGGCATGAGGACTACCGGAGCGA | |
| Gln28Term | TCGCTCCGGTAGTCCTCATGCCGAGCGGCGCATCTGCCGGGCTC | 6250 |
| CAG-TAG | CGGGGCCTCACACCCTAAAAACCTGCACGCCGGAACCTGTCGGT | |
| | GATGCCGAGGACGGTGCCGGAGGTGGCGAGCTG | |
| | CAGGTTTTTAGGGTGTG | 6251 |
| | CACACCCTAAAAACCTG | 6252 |
| Waxy starch | CCCCGGAGCCCGGCAGATGCGCCGCTCGGCATGAGGACTACCGG | 6253 |
| GBSS | AGCGAGCGCCGCCCCGTAGCAACAAAGCCGGAAAGCGCACCGCG | |
| Triticum aestivum | GGACCCGGCGGTGCCTCTCCATGGTGGTGCGCG | |
| Lys52Term | CGCGCACCACCATGGAGAGGCACCGCCGGGTCCCGCGGTGCGC | 6254 |
| AAG-TAG | TTTCCGGCTTTGTTGCTACGGGGCGGCGCTCGCTCCGGTAGTCCT | |
| | CATGCCGAGCGGCGCATCTGCCGGGCTCCGGGG | |
| | CCGCCCCGTAGCAACAA | 6255 |
| | TTGTTGCTACGGGGCGG | 6256 |
| Waxy starch | CGGAGCCCGGCAGATGCGCCGCTCGGCATGAGGACTACCGGAG | 6257 |
| GBSS | CGAGCGCCGCCCCGAAGTAACAAAGCCGGAAAGCGCACCGCGG | |
| Triticum aestivum | GACCCGGCGGTGCCTCTCCATGGTGGTGCGCGCCA | |
| Gln53Term | TGGCGCGCACCACCATGGAGAGGCACCGCCGGGTCCCGCGGTG | 6258 |
| CAA-TAA | CGCTTTCCGGCTTTGTTACTTCGGGGCGGCGCTCGCTCCGGTAGT | |
| | CCTCATGCCGAGCGGCGCATCTGCCGGGCTCCG | |
| | CCCCGAAGTAACAAAGC | 6259 |
| | GCTTTGTTACTTCGGGG | 6260 |
| Waxy starch | AGCCCGGCAGATGCGCCGCTCGGCATGAGGACTACCGGAGCGAG | 6261 |
| GBSS | CGCCGCCCCGAAGCAATAAAGCCGGAAAGCGCACCGCGGGACCC | |
| Triticum aestivum | GGCGGTGCCTCTCCATGGTGGTGCGCGCCACGG | |
| Gln54Term | CCGTGGCGCGCACCACCATGGAGAGGCACCGCCGGGTCCCGCG | 6262 |
| CAA-TAA | GTGCGCTTTCCGGCTTTATTGCTTCGGGGCGGCGCTCGCTCCGGT | |
| | AGTCCTCATGCCGAGCGGCGCATCTGCCGGGCT | |
| | CGAAGCAATAAAGCCGG | 6263 |
| | CCGGCTTTATTGCTTCG | 6264 |
| Waxy starch | CAGCTCGCCACCTCCGGCACCGTCCTCGGCATCACCGACAGGTT | 6265 |
| GBSS | CCGGCGTGCAGGTTTCTAGGGCGTGAGGCCCCGGAACCCGGCG | |
| Triticum durum | GATGCGGCCCTCGTCATGAGGACTATCGGAGCGA | |
| Gln28Term | TCGCTCCGATAGTCCTCATGACGAGGGCCGCATCCGCCGGGTTC | 6266 |
| CAG-TAG | CGGGGCCTCACGCCCTAGAAACCTGCACGCCGGAACCTGTCGGT | |
| | GATGCCGAGGACGGTGCCGGAGGTGGCGAGCTG | |
| | CAGGTTTCTAGGGCGTG | 6267 |
| | CACGCCCTAGAAACCTG | 6268 |
| Waxy starch | CCCCGGAACCCGGCGGATGCGGCCCTCGTCATGAGGACTATCGG | 6269 |
| GBSS | AGCGAGCGCCGCCCCGTAGCAAAGCCGGAAAGCGCACCGCGGG | |
| Triticum durum | AGCCGGCGGTGCCTCTCCATGGTGGTGCGCGCCA | |
| Lys52Term | TGGCGCGCACCACCATGGAGAGGCACCGCCGGCTCCCGCGGTG | 6270 |
| AAG-TAG | CGCTTTCCGGCTTTGCTACGGGGCGGCGCTCGCTCCGATAGTCCT | |
| | CATGACGAGGGCCGCATCCGCCGGGTTCCGGGG | |
| | CCGCCCCGTAGCAAAGC | 6271 |
| | GCTTTGCTACGGGGCGG | 6272 |
| Waxy starch | CGGAACCCGGCGGATGCGGCCCTCGTCATGAGGACTATCGGAGC | 6273 |
| GBSS | GAGCGCCGCCCCGAAGTAAAGCCGGAAAGCGCACCGCGGGAGC | |
| Triticum durum | CGGCGGTGCCTCTCCATGGTGGTGCGCGCCACGG | |
| Gln53Term | CCGTGGCGCGCACCACCATGGAGAGGCACCGCCGGCTCCCGCG | 6274 |
| CAA-TAA | GTGCGCTTTCCGGCTTTACTTCGGGGCGGCGCTCGCTCCGATAGT | |
| | CCTCATGACGAGGGCCGCATCCGCCGGGTTCCG | |
| | CCCCGAAGTAAAGCCGG | 6275 |
| | CCGGCTTTACTTCGGGG | 6276 |
| Waxy starch | GCGGATGCGGCCCTCGTCATGAGGACTATCGGAGCGAGCGCCGC | 6277 |
| GBSS | CCCGAAGCAAAGCCGGTAAGCGCACCGCGGGAGCCGGCGGTGC | |
| Triticum durum | CTCTCCATGGTGGTGCGCGCCACGGGCAGCGGCG | |
| Lys56Term | CGCCGCTGCCCGTGGCGCGCACCACCATGGAGAGGCACCGCCG | 6278 |
| AAA-TAA | GCTCCCGCGGTGCGCTTACCGGCTTTGCTTCGGGGCGGCGCTCG | |
| | CTCCGATAGTCCTCATGACGAGGGCCGCATCCGC | |
| | AAAGCCGGTAAGCGCAC | 6279 |
| | GTGCGCTTACCGGCTTT | 6280 |
| Waxy starch | TATCGGAGCGAGCGCCGCCCCGAAGCAAAGCCGGAAAGCGCACC | 6281 |
| GBSS | GCGGGAGCCGGCGGTGACTCTCCATGGTGGTGCGCGCCACGGG | |
| Triticum durum | CAGCGGCGGCATGAACCTCGTGTTCGTCGGCGCC | |
| Cys64Term | GGCGCCGACGAACACGAGGTTCATGCCGCCGCTGCCCGTGGCGC | 6282 |
| TGC-TGA | GCACCACCATGGAGAGTCACCGCCGGCTCCCGCGGTGCGCTTTC | |
| | CGGCTTTGCTTCGGGGCGGCGCTCGCTCCGATA | |
| | CGGCGGTGACTCTCCAT | 6283 |
| | ATGGAGAGTCACCGCCG | 6284 |
| Waxy starch | CAGCTCGCCACCTCCGGCACCGTCCTCGGCATCACCGACAGGTT | 6285 |
| GBSS | CCGGCGTGCAGGTTTTTAGGGTGTGAGGCCCCGGAGCCCGGCAG | |
| Triticum turgidum | ATGCGCCGCTCGGCATGAGGACTACCGGAGCGA | |
| Gln28Term | TCGCTCCGGTAGTCCTCATGCCGAGCGGCGCATCTGCCGGGCTC | 6286 |
| CAG-TAG | CGGGGCCTCACACCCTAAAAACCTGCACGCCGGAACCTGTCGGT | |
| | GATGCCGAGGACGGTGCCGGAGGTGGCGAGCTG | |
| | CAGGTTTTTAGGGTGTG | 6287 |
| | CACACCCTAAAAACCTG | 6288 |
| Waxy starch | CCCCGGAGCCCGGCAGATGCGCCGCTCGGCATGAGGACTACCGG | 6289 |
| GBSS | AGCGAGCGCCGCCCCGTAGCAACAAAGCCGGAAAGCGCACCGCG | |
| Triticum turgidum | GGACCCGGCGGTGCCTCTCCATGGTGGTGCGCG | |
| Lys52Term | CGCGCACCACCATGGAGAGGCACCGCCGGGTCCCGCGGTGCGC | 6290 |
| AAG-TAG | TTTCCGGCTTTGTTGCTACGGGGCGGCGCTCGCTCCGGTAGTCCT | |
| | CATGCCGAGCGGCGCATCTGCCGGGCTCCGGGG | |
| | CCGCCCCGTAGCAACAA | 6291 |
| | TTGTTGCTACGGGGCGG | 6292 |
| Waxy starch | CGGAGCCCGGCAGATGCGCCGCTCGGCATGAGGACTACCGGAG | 6293 |
| GBSS | CGAGCGCCGCCCCGAAGTAACAAAGCCGGAAAGCGCACCGCGG | |
| Triticum turgidum | GACCCGGCGGTGCCTCTCCATGGTGGTGCGCGCCA | |
| Gln53Term | TGGCGCGCACCACCATGGAGAGGCACCGCCGGGTCCCGCGGTG | 6294 |
| CAA-TAA | CGCTTTCCGGCTTTGTTACTTCGGGGCGGCGCTCGCTCCGGTAGT | |
| | CCTCATGCCGAGCGGCGCATCTGCCGGGCTCCG | |
| | CCCCGAAGTAACAAAGC | 6295 |
| | GCTTTGTTACTTCGGGG | 6296 |
| Waxy starch | AGCCCGGCAGATGCGCCGCTCGGCATGAGGACTACCGGAGCGAG | 6297 |
| GBSS | CGCCGCCCCGAAGCAATAAAGCCGGAAAGCGCACCGCGGGACCC | |
| Triticum turgidum | GGCGGTGCCTCTCCATGGTGGTGCGCGCCACGG | |
| Gln54Term | CCGTGGCGCGCACCACCATGGAGAGGCACCGCCGGGTCCCGCG | 6298 |
| CAA-TAA | GTGCGCTTTCCGGCTTTATTGCTTCGGGGCGGCGCTCGCTCCGGT | |
| | AGTCCTCATGCCGAGCGGCGCATCTGCCGGGCT | |
| | CGAAGCAATAAAGCCGG | 6299 |
| | CCGGCTTTATTGCTTCG | 6300 |
| Waxy starch | GATGCGCCGCTCGGCATGAGGACTACCGGAGCGAGCGCCGCCCC | 6301 |
| GBSS | GAAGCAACAAAGCCGGTAAGCGCACCGCGGGACCCGGCGGTGC | |
| Triticum turgidum | CTCTCCATGGTGGTGCGCGCCACGGGCAGCGCCG | |
| Lys57Term | CGGCGCTGCCCGTGGCGCGCACCACCATGGAGAGGCACCGCCG | 6302 |
| AAA-TAA | GGTCCCGCGGTGCGCTTACCGGCTTTGTTGCTTCGGGGCGGCGC | |
| | TCGCTCCGGTAGTCCTCATGCCGAGCGGCGCATC | |
| | AAAGCCGGTAAGCGCAC | 6303 |
| | GTGCGCTTACCGGCTTT | 6304 |
| Waxy starch | CAGCTCGCCACCTCCGCCACCGTCCTCGGCATCACCGACAGGTTC | 6305 |
| GBSS | CGCCATGCAGGTTTCTAGGGCGTGAGGCCCCGGAGCCCGGCAGA | |
| Aegilops speltoides | TGCGCCGCTCGGCATGAGGACTGTCGGAGCGA | |
| Gln28Term | TCGCTCCGACAGTCCTCATGCCGAGCGGCGCATCTGCCGGGCTC | 6306 |
| CAG-TAG | CGGGGCCTCACGCCCTAGAAACCTGCATGGCGGAACCTGTCGGT | |
| | GATGCCGAGGACGGTGGCGGAGGTGGCGAGCTG | |
| | CAGGTTTCTAGGGCGTG | 6307 |
| | CACGCCCTAGAAACCTG | 6308 |
| Waxy starch | GGTTTCCAGGGCGTGAGGCCCCGGAGCCCGGCAGATGCGCCGCT | 6309 |
| GBSS | CGGCATGAGGACTGTCTGAGCGAGCGCCGCCCCGAAGCAACAAA | |
| Aegilops speltoides | GCCGGAAAGCGCACCGCGGGACCCGGCGGTGCC | |
| Gly46Term | GGCACCGCCGGGTCCCGCGGTGCGCTTTCCGGCTTTGTTGCTTC | 6310 |
| GGA-TGA | GGGGCGGCGCTCGCTCAGACAGTCCTCATGCCGAGCGGCGCATC | |
| | TGCCGGGCTCCGGGGCCTCACGCCCTGGAAACC | |
| | GGACTGTCTGAGCGAGC | 6311 |
| | GCTCGCTCAGACAGTCC | 6312 |
| Waxy starch | CCCCGGAGCCCGGCAGATGCGCCGCTCGGCATGAGGACTGTCGG | 6313 |
| GBSS | AGCGAGCGCCGCCCCGTAGCAACAAAGCCGGAAAGCGCACCGCG | |
| Aegilops speltoides | GGACCCGGCGGTGCCTCTCGATGGTGGTGCGCG | |
| Lys52Term | CGCGCACCACCATCGAGAGGCACCGCCGGGTCCCGCGGTGCGCT | 6314 |
| AAG-TAG | TTCCGGCTTTGTTGCTACGGGGCGGCGCTCGCTCCGACAGTCCTC | |
| | ATGCCGAGCGGCGCATCTGCCGGGCTCCGGGG | |
| | CCGCCCCGTAGCAACAA | 6315 |
| | TTGTTGCTACGGGGCGG | 6316 |
| Waxy starch | CGGAGCCCGGCAGATGCGCCGCTCGGCATGAGGACTGTCGGAG | 6317 |
| GBSS | CGAGCGCCGCCCCGAAGTAACAAAGCCGGAAAGCGCACCGCGG | |
| Aegilops speltoides | GACCCGGCGGTGCCTCTCGATGGTGGTGCGCGCCA | |
| Gln53Term | TGGCGCGCACCACCATCGAGAGGCACCGCCGGGTCCCGCGGTG | 6318 |
| CAA-TAA | CGCTTTCCGGCTTTGTTACTTCGGGGCGGCGCTCGCTCCGACAGT | |
| | CCTCATGCCGAGCGGCGCATCTGCCGGGCTCCG | |
| | CCCCGAAGTAACAAAGC | 6319 |
| | GCTTTGTTACTTCGGGG | 6320 |
| Waxy starch | AGCCCGGCAGATGCGCCGCTCGGCATGAGGACTGTCGGAGCGAG | 6321 |
| GBSS | CGCCGCCCCGAAGCAATAAAGCCGGAAAGCGCACCGCGGGACCC | |
| Aegilops speltoides | GGCGGTGCCTCTCGATGGTGGTGCGCGCCACCG | |
| Gln54Term | CGGTGGCGCGCACCACCATCGAGAGGCACCGCCGGGTCCCGCG | 6322 |
| CAA-TAA | GTGCGCTTTCCGGCTTTATTGCTTCGGGGCGGCGCTCGCTCCGAC | |
| | AGTCCTCATGCCGAGCGGCGCATCTGCCGGGCT | |
| | CGAAGCAATAAAGCCGG | 6323 |
| | CCGGCTTTATTGCTTCG | 6324 |
| Waxy starch | AGTGCAGAGATCTTCCACAGCAACAGCTAGACAACCACCATGTCG | 6325 |
| GBSS | GCTCTCACCACGTCCTAGCTCGCCACCTCGGCCACCGGCTTCGG | |
| Oryza glaberrima | CATCGCTGACAGGTCGGCGCCGTCGTCGCTGC | |
| Gln8Term | GCAGCGACGACGGCGCCGACCTGTCAGCGATGCCGAAGCCGGT | 6326 |
| CAG-TAG | GGCCGAGGTGGCGAGCTAGGACGTGGTGAGAGCCGACATGGTG | |
| | GTTGTCTAGCTGTTGCTGTGGAAGATCTCTGCACT | |
| | CCACGTCCTAGCTCGCC | 6327 |
| | GGCGAGCTAGGACGTGG | 6328 |
| Waxy starch | TCCACAGCAACAGCTAGACAACCACCATGTCGGCTCTCACCACGT | 6329 |
| GBSS | CCCAGCTCGCCACCTAGGCCACCGGCTTCGGCATCGCTGACAGG | |
| Oryza glaberrima | TCGGCGCCGTCGTCGCTGCTCCGCCACGGGTT | |
| Ser12Term | AACCCGTGGCGGAGCAGCGACGACGGCGCCGACCTGTCAGCGAT | 6330 |
| TCG-TAG | GCCGAAGCCGGTGGCCTAGGTGGCGAGCTGGGACGTGGTGAGA | |
| | GCCGACATGGTGGTTGTCTAGCTGTTGCTGTGGA | |
| | CGCCACCTAGGCCACCG | 6331 |
| | CGGTGGCCTAGGTGGCG | 6332 |
| Waxy starch | CGGCTCTCACCACGTCCCAGCTCGCCACCTCGGCCACCGGCTTC | 6333 |
| GBSS | GGCATCGCTGACAGGTAGGCGCCGTCGTCGCTGCTCCGCCACGG | |
| Oryza glaberrima | GTTCCAGGGCCTCAAGCCCCGCAGCCCCGCCGG | |
| Ser22Term | CCGGCGGGGCTGCGGGGCTTGAGGCCCTGGAACCCGTGGCGGA | 6334 |
| TCG-TAG | GCAGCGACGACGGCGCCTACCTGTCAGCGATGCCGAAGCCGGTG | |
| | GCCGAGGTGGCGAGCTGGGACGTGGTGAGAGCCG | |
| | TGACAGGTAGGCGCCGT | 6335 |
| | ACGGCGCCTACCTGTCA | 6336 |
| Waxy starch | CCACGTCCCAGCTCGCCACCTCGGCCACCGGCTTCGGCATCGCT | 6337 |
| GBSS | GACAGGTCGGCGCCGTAGTCGCTGCTCCGCCACGGGTTCCAGGG | |
| Oryza glaberrima | CCTCAAGCCCCGCAGCCCCGCCGGCGGCGACGC | |
| Ser25Term | GCGTCGCCGCCGGCGGGGCTGCGGGGCTTGAGGCCCTGGAACC | 6338 |
| TCG-TAG | CGTGGCGGAGCAGCGACTACGGCGCCGACCTGTCAGCGATGCCG | |
| | AAGCCGGTGGCCGAGGTGGCGAGCTGGGACGTGG | |
| | GGCGCCGTAGTCGCTGC | 6339 |
| | GCAGCGACTACGGCGCC | 6340 |
| Waxy starch | CGTCCCAGCTCGCCACCTCGGCCACCGGCTTCGGCATCGCTGAC | 6341 |
| GBSS | AGGTCGGCGCCGTCGTAGCTGCTCCGCCACGGGTTCCAGGGCCT | |
| Oryza glaberrima | CAAGCCCCGCAGCCCCGCCGGCGGCGACGCGAC | |
| Ser26Term | GTCGCGTCGCCGCCGGCGGGGCTGCGGGGCTTGAGGCCCTGGA | 6342 |
| TCG-TAG | ACCCGTGGCGGAGCAGCTACGACGGCGCCGACCTGTCAGCGATG | |
| | CCGAAGCCGGTGGCCGAGGTGGCGAGCTGGGACG | |
| | GCCGTCGTAGCTGCTCC | 6343 |
| | GGAGCAGCTACGACGGC | 6344 |
| Waxy starch | TCCACAGCAAGAGCTAAACAGCCGACCGTGTGCACCACCATGTCG | 6345 |
| GBSS | GCTCTCACCACGTCCTAGCTCGCCACCTCGGCCACCGGCTTCGG | |
| Oryza sativa | CATCGCCGACAGGTCGGCGCCGTCGTCGCTGC | |
| Gln8Term | GCAGCGACGACGGCGCCGACCTGTCGGCGATGCCGAAGCCGGT | 6346 |
| GAG-TAG | GGCCGAGGTGGCGAGCTAGGACGTGGTGAGAGCCGACATGGTG | |
| | GTGCACACGGTCGGCTGTTTAGCTCTTGCTGTGGA | |
| | CCACGTCCTAGCTCGCC | 6347 |
| | GGCGAGCTAGGACGTGG | 6348 |
| Waxy starch | CTAAACAGCCGACCGTGTGCACCACCATGTCGGCTCTCACCACGT | 6349 |
| GBSS | CCCAGCTCGCCACCTAGGCCACCGGCTTCGGCATCGCCGACAGG | |
| Oryza sativa | TCGGCGCCGTCGTCGCTGCTTCGCCACGGGTT | |
| Ser12Term | AACCCGTGGCGAAGCAGCGACGACGGCGCCGACCTGTCGGCGAT | 6350 |
| TCG-TAG | GCCGAAGCCGGTGGCCTAGGTGGCGAGCTGGGACGTGGTGAGA | |
| | GCCGACATGGTGGTGCACACGGTCGGCTGTTTAG | |
| | CGCCACCTAGGCCACCG | 6351 |
| | CGGTGGCCTAGGTGGCG | 6352 |
| Waxy starch | CGGCTCTCACCACGTCCCAGCTCGCCACCTCGGCCACCGGCTTC | 6353 |
| GBSS | GGCATCGCCGACAGGTAGGCGCCGTCGTCGCTGCTTCGCCACGG | |
| Oryza sativa | GTTCCAGGGCCTCAAGCCCCGTAGCCCAGCCGG | |
| Ser22Term | CCGGCTGGGCTACGGGGCTTGAGGCCCTGGAACCCGTGGCGAA | 6354 |
| TCG-TAG | GCAGCGACGACGGCGCCTACCTGTCGGCGATGCCGAAGCCGGTG | |
| | GCCGAGGTGGCGAGCTGGGACGTGGTGAGAGCCG | |
| | CGACAGGTAGGCGCCGT | 6355 |
| | ACGGCGCCTACCTGTCG | 6356 |
| Waxy starch | CCACGTCCCAGCTCGCCACCTCGGCCACCGGCTTCGGCATCGCC | 6357 |
| GBSS | GACAGGTCGGCGCCGTAGTCGCTGCTTCGCCACGGGTTCCAGGG | |
| Oryza sativa | CCTCAAGCCCCGTAGCCCAGCCGGCGGGGACGC | |
| Ser25Term | GCGTCCCCGCCGGCTGGGCTACGGGGCTTGAGGCCCTGGAACCC | 6358 |
| TCG-TAG | GTGGCGAAGCAGCGACTACGGCGCCGACCTGTCGGCGATGCCGA | |
| | AGCCGGTGGCCGAGGTGGCGAGCTGGGACGTGG | |
| | GGCGCCGTAGTCGCTGC | 6359 |
| | GCAGCGACTACGGCGCC | 6360 |
| Waxy starch | CGTCCCAGCTCGCCACCTCGGCCACCGGCTTCGGCATCGCCGAC | 6361 |
| GBSS | AGGTCGGCGCCGTCGTAGCTGCTTCGCCACGGGTTCCAGGGCCT | |
| Oryza sativa | CAAGCCCCGTAGCCCAGCCGGCGGGGACGCATC | |
| Ser26Term | GATGCGTCCCCGCCGGCTGGGCTACGGGGCTTGAGGCCCTGGAA | 6362 |
| TCG-TAG | CCCGTGGCGAAGCAGCTACGACGGCGCCGACCTGTCGGCGATGC | |
| | CGAAGCCGGTGGCCGAGGTGGCGAGCTGGGACG | |
| | GCCGTCGTAGCTGCTTC | 6363 |
| | GAAGCAGCTACGACGGC | 6364 |
| Waxy starch | GTCTCTCACTGCAGGTAGCCACACCCTGTGCGCGGCGCCATGGC | 6365 |
| GBSS | GGCTCTGGCCACGTCCTAGCTCGCCACCTCCGGCACCGTCCTCG | |
| Hordeum vulgare | GCGTCACCGACAGATTCCGGCGTCCAGGTTTTC | |
| Gln8Term | GAAAACCTGGACGCCGGAATCTGTCGGTGACGCCGAGGACGGTG | 6366 |
| GAG-TAG | CCGGAGGTGGCGAGCTAGGACGTGGCCAGAGCCGCCATGGCGC | |
| | CGCGCACAGGGTGTGGCTACCTGCAGTGAGAGAC | |
| | CCACGTCCTAGCTCGCC | 6367 |
| | GGCGAGCTAGGACGTGG | 6368 |
| Waxy starch | ATGGCGGCTCTGGCCACGTCCCAGCTCGCCACCTCCGGCACCGT | 6369 |
| GBSS | CCTCGGCGTCACCGACTGATTCCGGCGTCCAGGTTTTCAGGGCCT | |
| Hordeum vulgare | CAGGCCCCGGAACCCGGCGGATGCGGCGCTTG | |
| Arg21Term | CAAGCGCCGCATCCGCCGGGTTCCGGGGCCTGAGGCCCTGAAAA | 6370 |
| AGA-TGA | CCTGGACGCCGGAATCAGTCGGTGACGCCGAGGACGGTGCCGG | |
| | AGGTGGCGAGCTGGGACGTGGCCAGAGCCGCCAT | |
| | TGACCGACTGATTCCGG | 6371 |
| | CCGGAATCAGTCGGTGA | 6372 |
| Waxy starch | CAGCTCGCCACCTCCGGCACCGTCCTCGGCGTCACCGACAGATT | 6373 |
| GBSS | CCGGCGTCCAGGTTTTTAGGGCCTCAGGCCCCGGAACCCGGCGG | |
| Hordeum vulgare | ATGCGGCGCTTGGTATGAGGACTATCGGAGCAA | |
| Gln28Term | TTGCTCCGATAGTCCTCATACCAAGCGCCGCATCCGCCGGGTTCC | 6374 |
| GAG-TAG | GGGGCCTGAGGCCCTAAAAACCTGGACGCCGGAATCTGTCGGTG | |
| | ACGCCGAGGACGGTGCCGGAGGTGGCGAGCTG | |
| | CAGGTTTTTAGGGCCTC | 6375 |
| | GAGGCCCTAAAAACCTG | 6376 |
| Waxy starch | GGTTTTGAGGGCCTCAGGCCCCGGAACCCGGCGGATGCGGCGCT | 6377 |
| GBSS | TGGTATGAGGACTATCTGAGCAAGCGCCGCCCCGAAGCAAAGCC | |
| Hordeum vulgare | GGAAAGCGCACCGCGGGAGCCGGCGGTGCCTCT | |
| Gly46Term | AGAGGCACCGCCGGCTCCCGCGGTGCGCTTTCCGGCTTTGCTTC | 6378 |
| GGA-TGA | GGGGCGGCGCTTGCTCAGATAGTCCTCATACCAAGCGCCGCATC | |
| | CGCCGGGTTCCGGGGCCTGAGGCCCTGAAAACC | |
| | GGACTATCTGAGCAAGC | 6379 |
| | GCTTGCTCAGATAGTCC | 6380 |
| Waxy starch | CCCCGGAACCCGGCGGATGCGGCGCTTGGTATGAGGACTATCGG | 6381 |
| GBSS | AGCAAGCGCCGCCCCGTAGCAAAGCCGGAAAGCGCACGGCGGG | |
| Hordeum vulgare | AGGCGGCGGTGCCTCTCCGTGGTGGTGAGCGCCA | |
| Lys52Term | TGGCGCTCACCACCACGGAGAGGCACCGCCGGCTGCCGCGGTGC | 6382 |
| AAG-TAG | GCTTTCCGGCTTTGCTACGGGGCGGCGCTTGCTCCGATAGTCCTC | |
| | ATACCAAGCGCCGCATCCGCCGGGTTCCGGGG | |
| | CCGCCCCGTAGCAAAGC | 6383 |
| | GCTTTGCTACGGGGCGG | 6384 |
| Waxy starch | ACGTCTTTTCTCTCTCTCCTACGCAGTGGATTAATCGGCATGGCGG | 6385 |
| GBSS | CTCTGGCCACGTCGTAGCTCGTCGCAACGCGCGCCGGCCTGGGC | |
| Zea mays | GTCCCGGACGCGTCCACGTTCCGCCGCGGCG | |
| Gln8Term | CGCCGCGGCGGAACGTGGACGCGTCCGGGACGCCCAGGCCGGC | 6386 |
| GAG-TAG | GCGCGTTGCGACGAGCTACGACGTGGCCAGAGGCGCCATGCCGA | |
| | TTAATCCACTGCGTAGGAGAGAGAGAAAAGACGT | |
| | GCACGTCGTAGCTCGTC | 6387 |
| | GACGAGCTACGACGTGG | 6388 |
| Waxy starch | GTCGCAACGCGCGCCGGCCTGGGCGTCCCGGACGCGTCCACGTT | 6389 |
| GBSS | CCGCCGCGGCGCCGCGTAGGGCCTGAGGGGGGCCCGGGCGTCG | |
| Zea mays | GCGGCGGCGGACACGCTCAGCATGCGGACCAGCG | |
| Gln30Term | CGCTGGTCCGCATGCTGAGCGTGTCCGCCGCCGCCGACGCCCGG | 6390 |
| GAG-TAG | GCCCCCCTCAGGCCCTACGCGGCGCCGCGGCGGAACGTGGACG | |
| | CGTCCGGGACGCCCAGGCCGGCGCGCGTTGCGAC | |
| | GCGCCGCGTAGGGCCTG | 6391 |
| | CAGGCCCTACGCGGCGC | 6392 |
| Waxy starch | TCCCGGACGCGTCCACGTTCCGCCGCGGCGCCGCGCAGGGCCT | 6393 |
| GBSS | GAGGGGGGCCCGGGCGTAGGCGGCGGCGGACACGCTCAGCATG | |
| Zea mays | CGGACCAGCGCGCGCGCGGCGCCCAGGCACCAGCA | |
| Ser38Term | TGCTGGTGCCTGGGCGCCGCGCGCGCGCTGGTCCGCATGCTGAG | 6394 |
| TCG-TAG | CGTGTCCGCCGCCGCCTACGCCCGGGCCCCCCTCAGGCCCTGCG | |
| | CGGCGCCGCGGCGGAACGTGGACGCGTCCGGGA | |
| | CCGGGCGTAGGCGGCGG | 6395 |
| | CCGCCGGCTACGCCCGG | 6396 |
| Waxy starch | GCGTCGGCGGCGGCGGACACGCTCAGCATGCGGACCAGCGCGC | 6397 |
| GBSS | GCGCGGCGCCCAGGCACTAGCAGCAGGCGCGCCGCGGGGGCAG | |
| Zea mays | GTTCCCGTCGCTCGTCGTGTGCGCCAGCGCCGGCA | |
| Ser57Term | TGCCGGCGCTGGCGCACACGACGAGCGACGGGAACCTGCCCCC | 6398 |
| GAG-TAG | GCGGCGCGCCTGGTGGTAGTGCCTGGGCGGGGCGCGCGGGCTG | |
| | GTCCGCATGGTGAGCGTGTCCGCGGCCGCCGACGC | |
| | CCAGGCACTAGCAGCAG | 6399 |
| | CTGCTGCTAGTGCCTGG | 6400 |
| Waxy starch | TCGGCGGCGGCGGACACGCTCAGCATGCGGACCAGCGCGCGCG | 6401 |
| GBSS | CGGCGCCCAGGCACCAGTAGCAGGCGCGCCGCGGGGGCAGGTT | |
| Zea mays | CCCGTCGCTCGTCGTGTGCGCCAGCGCCGGCATGA | |
| Gln58Term | TCATGCCGGCGCTGGCGCACACGACGAGCGACGGGAACCTGCCC | 6402 |
| GAG-TAG | CCGCGGCGCGCCTGCTACTGGTGCCTGGGCGCCGCGCGCGCGC | |
| | TGGTCCGCATGCTGAGCGTGTCCGCCGCCGCCGA | |
| | GGCACCAGTAGCAGGCG | 6403 |
| | CGCCTGCTACTGGTGCC | 6404 |

### EXAMPLE 32

### Altering Fatty Acid Content of Plants

[0272] Improved means to manipulate fatty acid compositions, from biosynthetic or natural plant sources, are needed. For example, oils containing reduced saturated fatty acids are desired for dietary reasons and oils containing increased saturated fatty acids are also needed as alternatives to current sources of highly saturated oil products, such as tropical oils or chemically hydrogenated oils. It would therefore be advantageous to influence directly the production and composition of fatty acids in crop plants.

[0273] Higher plants synthesize fatty acids, primarily palmitic, stearic and oleic acids, in the plastids (i.e., chloroplasts, proplastids, or other related organelles) as part of the Fatty Acid Synthase (FAS) complex. Fatty acid synthesis is the result of the three enzymatic activities: acyl-ACP elongase, acyl-ACP desaturase and acyl-ACP thioesterases specific for each of palmitoyl-, stearoyl- and oleoyl-ACP.

[0274] A variety of enzymes have been identified that influence the relative levels of saturated vs. unsaturated fatty acids in plants. For example, the enzymes stearoyl-acyl carrier protein (stearoyl-ACP) desaturase, oleoyl desaturase and linoleate desaturase produce unsaturated fatty acids from saturated precursors. Similarly, relative enzymatic activities of the various acyl-ACP thioesterases influences the relative acyl-chain composition of the resultant fatty acids. Consequently a reduction or an increase of the activity of these enzymes can alter the properties of oils produced in a plant. In fact, specific targeting of particular enzymatic activities can results in altered levels of particular fatty acids.

[0275] The attached tables disclose exemplary oligonucleotides base sequences which can be used to generate site-specific mutations in plant genes encoding proteins involved in fatty acid biosynthesis.

TABLE 40
Oligonucleotides to produce plants with reduced palmitate

| Phenotype, Gene, | | |
|---|---|---|
| Plant & Targeted | | SEQ ID |
| Alteration | Altering Oligos | NO: |
| Reduced palmitate | TTTGGTGGCAGTGTCTTTGAACGCTTCATCTCCTCGTCATGGTGGC | 6405 |
| Acyl-ACP-thioesterase | CACCTCTGCTACGTAGTCATTCTTTCCTGTACCATCTTCTTCACTTG | |
| Arabidopsis thaliana | ATCCTAATGGAAAAGGCAATAAGATTGG | |
| Ser8Term | CCAATCTTATTGCCTTTTCCATTAGGATCAAGTGAAGAAGATGGTA | 6406 |
| TCG-TAG | CAGGAAAGAATGACTACGTAGCAGAGGTGGCCACCATGACGAGG | |
| | AGATGAAGCGTTCAAAGACACTGCCACCAAA | |
| | TGCTACGTAGTCATTCT | 6407 |
| | AGAATGACTACGTAGCA | 6408 |
| Reduced palmitate | GGTGGCAGTGTCTTTGAACGCTTCATCTCCTCGTCATGGTGGCCA | 6409 |
| Acyl-ACP-thioesterase | CCTCTGCTACGTCGTGATTCTTTCCTGTACCATCTTCTTCACTTGAT | |
| Arabidopsis thaliana | CCTAATGGAAAAGGCAATAAGATTGGGTC | |
| Ser9Term | GACCCAATCTTATTGCCTTTTCCATTAGGATCAAGTGAAGAAGATG | 6410 |
| TCA-TGA | GTACAGGAAAGAATCACGACGTAGCAGAGGTGGCCACCATGACG | |
| | AGGAGATGAAGCGTTCAAAGACACTGCCACC | |
| | TACGTCGTGATTCTTTC | 6411 |
| | GAAAGAATCACGACGTA | 6412 |
| Reduced palmitate | ATCTCCTCGTCATGGTGGCCACCTCTGCTACGTCGTCATTCTTTCC | 6413 |
| Acyl-ACP-thioesterase | TGTACCATCTTCTTGACTTGATCCTAATGGAAAAGGCAATAAGATT | |
| Arabidopsis thaliana | GGGTCTACGAATCTTGCTGGACTCAATTC | |
| Ser17Term | GAATTGAGTCCAGCAAGATTCGTAGACCCAATCTTATTGCCTTTTC | 6414 |
| TCA-TGA | CATTAGGATCAAGTCAAGAAGATGGTACAGGAAAGAATGACGACG | |
| | TAGCAGAGGTGGCCACCATGACGAGGAGAT | |
| | ATCTTCTTGACTTGATC | 6415 |
| | GATCAAGTCAAGAAGAT | 6416 |
| Reduced palmitate | GTGGCCACCTCTGCTACGTCGTCATTCTTTCCTGTACCATCTTCTT | 6417 |
| Acyl-ACP-thioesterase | CACTTGATCCTAATTGAAAAGGCAATAAGATTGGGTCTACGAATCT | |
| Arabidopsis thaliana | TGCTGGACTCAATTCTGCACCTAACTCTG | |
| Gly22Term | CAGAGTTAGGTGCAGAATTGAGTCCAGCAAGATTCGTAGACCCAA | 6418 |
| GGA-TGA | TCTTATTGCCTTTTCAATTAGGATCAAGTGAAGAAGATGGTACAGG | |
| | AAAGAATGACGACGTAGCAGAGGTGGCCAC | |
| | ATCCTAATTGAAAAGGC | 6419 |
| | GCCTTTTCAATTAGGAT | 6420 |
| Reduced palmitate | GCTTGAATTTGTGATCTGATTGGTTAATTGTGGCCACAATGGTTGC | 6421 |
| Acyl-ACP-thioesterase | TACTGCCGCCACGTGATCATTCTTTCCGTTGACTTCCCCTTCTGGG | |
| Garcinia mangostana | GATGCCAAATCGGGCAATCCCGGAAAAGG | |
| Ser8Term | CCTTTTCCGGGATTGCCCGATTTGGCATCCCCAGAAGGGGAAGTC | 6422 |
| TCA-TGA | AACGGAAAGAATGATCACGTGGCGGCAGTAGCAACCATTGTGGCC | |
| | ACAATTAACCAATCAGATCACAAATTCAAGC | |
| | CGCCACGTGATCATTCT | 6423 |
| | AGAATGATCACGTGGCG | 6424 |
| Reduced palmitate | TGAATTTGTGATCTGATTGGTTAATTGTGGCCACAATGGTTGCTAC | 6425 |
| Acyl-ACP-thioesterase | TGCCGCCACGTCATGATTCTTTCCGTTGACTTCCCCTTCTGGGGAT | |
| Garcinia mangostana | GCCAAATCGGGCAATCCCGGAAAAGGGTC | |
| Ser9Term | GACCCTTTTCCGGGATTGCCCGATTTGGCATCCCCAGAAGGGGAA | 6426 |
| TCA-TGA | GTCAACGGAAAGAATCATGACGTGGCGGCAGTAGCAACCATTGTG | |
| | GCCACAATTAACCAATCAGATCACAAATTCA | |
| | CACGTCATGATTCTTTC | 6427 |
| | GAAAGAATCATGACGTG | 6428 |
| Reduced palmitate | CTGATTGGTTAATTGTGGCCACAATGGTTGCTACTGCCGCCACGT | 6429 |
| Acyl-ACP-thioesterase | CATCATTCTTTCCGTAGACTTCCCCTTCTGGGGATGCCAAATCGGG | |
| Garcinia mangostana | CAATCCCGGAAAAGGGTCGGTGAGTTTTGG | |
| Leu13Term | CCAAAACTCACCGACCCTTTTCCGGGATTGCCCGATTTGGCATCC | 6430 |
| TTG-TAG | CCAGAAGGGGAAGTCTACGGAAAGAATGATGACGTGGCGGCAGT | |
| | AGCAACCATTGTGGCCACAATTAACCAATCAG | |
| | CTTTCCGTAGACTTCCC | 6431 |
| | GGGAAGTCTACGGAAAG | 6432 |
| Reduced palmitate | ATGGTTGCTACTGCCGCCACGTCATCATTCTTTCCGTTGACTTCCC | 6433 |
| Acyl-ACP-thioesterase | CTTCTGGGGATGCCTAATCGGGCAATCCCGGAAAAGGGTCGGTG | |
| Garcinia mangostana | AGTTTTGGGTCAATGAAGTCGAAATCCGCGG | |
| Lys21Term | CCGCGGATTTCGACTTCATTGACCCAAAACTCACCGACCCTTTTCC | 6434 |
| AAA-TAA | GGGATTGCCCGATTAGGCATCCCCAGAAGGGGAAGTCAACGGAA | |
| | AGAATGATGACGTGGCGGCAGTAGCAACCAT | |
| | GGGATGCCTAATCGGGC | 6435 |
| | GCCCGATTAGGCATCCC | 6436 |
| Reduced palmitate | GGGATTTCAGCACGAAATTGAAGTTGTTTTTAAAAACCATGGTTGC | |
| Acyl-ACP-thioesterase | TACTGCTGTGACATAGGCGTTTTTCCCAGTCACTTCTTCACCTGAC | |
| Gossypium hirsutum | TCCTCTGACTCGAAAAACAAGAAGCTCGG | |
| Ser8Term | CCGAGCTTCTTGTTTTTCGAGTCAGAGGAGTCAGGTGAAGAAGTG | 6438 |
| TCG-TAG | ACTGGGAAAAACGCCTATGTCACAGCAGTAGCAACCATGGTTTTTA | |
| | AAAACAACTTCAATTTCGTGCTGAAATCCC | |
| | TGTGACATAGGCGTTTT | 6439 |
| | AAAACGCCTATGTCACA | 6440 |
| Reduced palmitate | TGTTTTTAAAAACCATGGTTGCTACTGCTGTGACATCGGCGTTTTT | 6441 |
| Acyl-ACP-thioesterase | CCCAGTCACTTCTTGACCTGACTCCTCTGACTCGAAAAACAAGAAG | |
| Gossypium hirsutum | CTCGGAAGCATCAAGTCGAAGCCATCGGT | |
| Ser16Term | ACCGATGGCTTCGACTTGATGCTTCCGAGCTTCTTGTTTTTCGAGT | 6442 |
| TCA-TGA | CAGAGGAGTCAGGTCAAGAAGTGACTGGGATAAAACGCCGATGTCA | |
| | CAGCAGTAGCAACCATGGTTTTTAAAAACA | |
| | CACTTCTTGACCTGACT | 6443 |
| | AGTCAGGTCAAGAAGTG | 6444 |
| Reduced palmitate | TTGCTACTGCTGTGACATCGGCGTTTTTCCCAGTCACTTCTTCACC | 6445 |
| Acyl-ACP-thioesterase | TGACTCCTCTGACTAGAAAAACAAGAAGCTCGGAAGCATCAAGTC | |
| Gossypium hirsutum | GAAGCCATCGGTTTCTTCTGGAAGTTTGCA | |
| Ser22Term | TGCAAACTTCCAGAAGAAACCGATGGCTTCGACTTGATGCTTCCG | 6446 |
| TCG-TAG | AGCTTCTTGTTTTTCTAGTCAGAGGAGTCAGGTGAAGAAGTGACTG | |
| | GGAAAAACGCCGATGTCACAGCAGTAGCAA | |
| | CTCTGACTAGAAAAACA | 6447 |
| | TGTTTTTCTAGTCAGAG | 6448 |
| Reduced palmitate | GCTACTGCTGTGACATCGGCGTTTTTCCCAGTCACTTCTTCACCTG | 6449 |
| Acyl-ACP-thioesterase | ACTCCTCTGACTCGTAAAACAAGAAGCTCGGAAGCATCAAGTCGA | |
| Gossypium hirsutum | AGCCATCGGTTTCTTCTGGAAGTTTGCAAG | |
| Lys23Term | CTTGCAAACTTCCAGAAGAAACCGATGGCTTCGACTTGATGCTTCC | 6450 |
| AAA-TAA | GAGCTTCTTGTTTTACGAGTCAGAGGAGTCAGGTGAAGAAGTGAC | |
| | TGGGAAAAACGCCGATGTCACAGCAGTAGC | |
| | CTGACTCGTAAAACAAG | 6451 |
| | CTTGTTTTACGAGTCAG | 6452 |
| Reduced palmitate | CTCCCGCTCGTTGAAAGACAATGGTGGCTACCGCTGCAAGCTCTG | 6453 |
| Acyl-ACP-thioesterase | CATTCTTCCCCGTGTAGTCCCCGGTCACCTCCTCTAGACCAGGAA | |
| Cuphea hookeriana | AGCCCGGAAATGGGTCATCGAGCTTCAGCCC | |
| Ser14Term | GGGCTGAAGCTCGATGACCCATTTCCGGGCTTTCCTGGTCTAGAG | 6454 |
| TCG-TAG | GAGGTGACCGGGGACTACACGGGGAAGAATGCAGAGCTTGCAGC | |
| | GGTAGCCACCATTGTCTTTCAACGAGCGGGAG | |
| | CCCCGTGTAGTCCCCGG | 6455 |
| | CCGGGGACTACACGGGG | 6456 |
| Reduced palmitate | ATGGTGGCTACCGCTGCAAGCTCTGCATTCTTCCCCGTGTCGTCC | 6457 |
| Acyl-ACP-thioesterase | CCGGTCACCTCCTCTTGACCAGGAAAGCCCGGAAATGGGTCATCG | |
| Cuphea hookeriana | AGCTTCAGCCCCATCAAGCCCAAATTTGTCG | |
| Arg21Term | CGACAAATTTGGGCTTGATGGGGCTGAAGCTCGATGACCCATTTC | 6458 |
| AGA-TGA | CGGGCTTTCCTGGTCAAGAGGAGGTGACCGGGGACGACACGGG | |
| | GAAGAATGCAGAGCTTGCAGCGGTAGCCACCAT | |
| | CCTCCTCTTGACCAGGA | 6459 |
| | TCCTGGTCAAGAGGAGG | 6460 |
| Reduced palmitate | GCTACCGCTGCAAGCTCTGCATTCTTCCCCGTGTCGTCCCCGGTC | 6461 |
| Acyl-ACP-thioesterase | ACCTCCTCTAGACCATGAAAGCCCGGAAATGGGTCATCGAGCTTC | |
| Cuphea hookeriana | AGCCCCATCAAGCCCAAATTTGTCGCCAATG | |
| Gly23Term | CATTGGCGACAAATTTGGGCTTGATGGGGCTGAAGCTCGATGACC | 6462 |
| GGA-TGA | CATTTCCGGGCTTTCATGGTCTAGAGGAGGTGACCGGGGACGAC | |
| | ACGGGGAAGAATGCAGAGCTTGCAGCGGTAGC | |
| | CTAGACCATGAAAGCCC | 6463 |
| | GGGCTTTCATGGTCTAG | 6464 |
| Reduced palmitate | ACCGCTGCAAGCTCTGCATTCTTCCCCGTGTCGTCCCCGGTCACC | 6465 |
| Acyl-ACP-thioesterase | TCCTCTAGACCAGGATAGCCCGGAAATGGGTCATCGAGCTTCAGC | |
| Cuphea hookeriana | CCCATCAAGCCCAAATTTGTCGCCAATGGCG | |
| Lys24Term | CGCCATTGGCGACAAATTTTGGGCTTGATGGGGCTGAAGCTCGATG | 6466 |
| AAG-TAG | ACCCATTTCCGGGCTATCCTGGTCTAGAGGAGGTGACCGGGGAC | |
| | GACACGGGGAAGAATGCAGAGCTTGCAGCGGT | |
| | GACCAGGATAGCCCGGA | 6467 |
| | TCCGGGCTATCCTGGTC | 6468 |
| Reduced palmitate | GCCACCGCTGCAAGTTCTGCATTCTTCCCCCTGCCGTCCCCGGAC | 6469 |
| Acyl-ACP-thioesterase | ACCTCCTCTAGGCCGTGAAAGCTCGGAAATGGGTCATCGAGCTTG | |
| Cuphea lanceolata | AGCCCCCTCAAGCCCAAATTTGTCGCCAATG | |
| Gly23Term | CATTGGCGACAAATTTGGGCTTGAGGGGGCTCAAGCTCGATGACC | 6470 |
| GGA-TGA | CATTTCCGAGCTTTCACGGCCTAGAGGAGGTGTCCGGGGACGGC | |
| | AGGGGGAAGAATGCAGAACTTGCAGCGGTGGC | |
| | CTAGGCCGTGAAAGCTC | 6471 |
| | GAGCTTTCACGGCCTAG | 6472 |
| Reduced palmitate | ACCGCTGCAAGTTCTGCATTCTTCCCCCTGCCGTCCCCGGACACC | 6473 |
| Acyl-ACP-thioesterase | TCCTCTAGGCCGGGATAGCTCGGAAATGGGTCATCGAGCTTGAGC | |
| Cuphea lanceolata | CCCCTCAAGCCCAAATTTGTCGCCAATGCCG | |
| Lys24Term | CGGCATTGGCGACAAATTTGGGCTTGAGGGGGCTCAAGCTCGAT | 6474 |
| AAG-TAG | GACCCATTTCCGAGCTATCCCGGCCTAGAGGAGGTGTCCGGGGA | |
| | CGGCAGGGGGAAGAATGCAGAACTTGCAGCGGT | |
| | GGCCGGGATAGCTCGGA | 6475 |
| | TCCGAGCTATCCCGGCC | 6476 |
| Reduced palmitate | GCAAGTTCTGCATTCTTCCCCCTGCCGTCCCCGGACACCTCCTCT | 6477 |
| Acyl-ACP-thioesterase | AGGCCGGGAAAGCTCTGAAATGGGTCATCGAGCTTGAGCCCCCT | |
| Cuphea lanceolata | CAAGCCCAAATTTGTCGCCAATGCCGGGTTGA | |
| Gly26Term | TCAACCCGGCATTGGCGACAAATTTGGGCTTGAGGGGGCTCAAGC | 6478 |
| GGA-TGA | TCGATGACCCATTTCAGAGCTTTCCCGGCCTAGAGGAGGTGTCCG | |
| | GGGACGGCAGGGGGAAGAATGCAGAACTTGC | |
| | GAAAGCTCTGAAATGGG | 6479 |
| | CCCATTTCAGAGCTTTC | 6480 |
| Reduced palmitate | CATTCTTCCCCCTGCCGTCCCCGGACACCTCCTCTAGGCCGGGAA | 6481 |
| Acyl-ACP-thioesterase | AGCTCGGAAATGGGTGATCGAGCTTGAGCCCCCTCAAGCCCAAAT | |
| Cuphea lanceolata | TTGTCGCCAATGCCGGGTTGAAGGTTAAGGC | |
| Ser29term | GCCTTAACCTTCAACCCGGCATTGGCGACAAATTTGGGCTTGAGG | 6482 |
| TCA-TGA | GGGCTCAAGCTCGATCACCCATTTCCGAGCTTTCCCGGCCTAGAG | |
| | GAGGTGTCCGGGGACGGCAGGGGGAAGAATG | |
| | AAATGGGTGATCGAGCT | 6483 |
| | AGCTCGATCACCCATTT | 6484 |
| Reduced palmitate | CGTTTAAGTGGATCGGACATTTAAGTGTTTTAATCATGGTAGCTAT | 6485 |
| Acyl-ACP-thioesterase | GAGTGCTACTGCGTAGCTGTTTCCGGTTTCTTCCCCAAAACCTCAC | |
| Helianthus annuus | TCTGGAGCCAAGACATCTGATAAGCTTGG | |
| Ser9Term | CCAAGCTTATCAGATGTCTTGGCTCCAGAGTGAGGTTTTGGGGAA | 6486 |
| TCG-TAG | GAAACCGGAAACAGCTACGCAGTAGCACTCATAGCTACCATGATT | |
| | AAAACACTTAAATGTCCGATCCACTTAAACG | |
| | TACTGCGTAGCTGTTTC | 6487 |
| | GAAACAGCTACGCAGTA | 6488 |
| Reduced palmitate | AGTGTTTTAATCATGGTAGCTATGAGTGCTACTGCGTCGCTGTTTC | 6489 |
| Acyl-ACP-thioesterase | CGGTTTCTTCCCCATAACCTCACTCTGGAGCCAAGACATCTGATAA | |
| Helianthus annuus | GCTTGGAGGTGAACCAGGTAGTGTTGCTG | |
| Lys17Term | CAGCAACACTACCTGGTTCACCTCCAAGCTTATCAGATGTCTTGGC | 6490 |
| AAA-TAA | TCCAGAGTGAGGTTATGGGGAAGAAACCGGAAACAGCGACGCAG | |
| | TAGCACTCATAGCTACCATGATTAAAACACT | |
| | CTTCCCCATAACCTCAC | 6491 |
| | GTGAGGTTATGGGGAAG | 6492 |
| Reduced palmitate | ATGGTAGCTATGAGTGCTACTGCGTCGCTGTTTCCGGTTTCTTCCC | 6493 |
| Acyl-ACP-thioesterase | CAAAACCTCACTCTTGAGCCAAGACATCTGATAAGCTTGGAGGTG | |
| Helianthus annuus | AACCAGGTAGTGTTGCTGTGCGCGGAATCA | |
| Gly21Term | TGATTCCGCGCACAGCAACACTACCTGGTTCACCTCCAAGCTTATC | 6494 |
| GGA-TGA | AGATGTCTTGGCTCAAGAGTGAGGTTTTGGGGAAGAAACCGGAAA | |
| | CAGCGACGCAGTAGCACTCATAGCTACCAT | |
| | CTCACTCTTGAGCCAAG | 6495 |
| | CTTGGCTCAAGAGTGAG | 6496 |
| Reduced palmitate | GCTATGAGTGCTACTGCGTCGCTGTTTCCGGTTTCTTCCCCAAAAC | 6497 |
| Acyl-ACP-thioesterase | CTCACTCTGGAGCCTAGACATCTGATAAGCTTGGAGGTGAACCAG | |
| Helianthus annuus | GTAGTGTTGCTGTGCGCGGAATCAAGACAA | |
| Lys23Term | TTGTCTTGATTCCGCGCACAGCAACACTACCTGGTTCACCTCCAAG | 6498 |
| AAG-TAG | CTTATCAGATGTCTAGGCTCCAGAGTGAGGTTTTGGGGAAGAAAC | |
| | CGGAAACAGCGACGCAGTAGCACTCATAGC | |
| | CTGGAGCCTAGACATCT | 6499 |
| | AGATGTCTAGGCTCCAG | 6500 |
| Reduced palmitate | ATGGTGGCTGCTGCAGCAAGTTCTGCATGCTTCCCTGTTCCATCC | 6501 |
| Acyl-ACP-thioesterase | CCAGGAGCCTCCCCTTAACCTGGGAAGTTAGGCAACTGGTCATCG | |
| Cuphea palustris | AGTTTGAGCCCTTCCTTGAAGCCCAAGTCAA | |
| Lys21Term | TTGACTTGGGCTTCAAGGAAGGGCTCAAACTCGATGACCAGTTGC | 6502 |
| AAA-TAA | CTAACTTCCCAGGTTAAGGGGAGGCTCCTGGGGATGGAACAGGG | |
| | AAGCATGCAGAACTTGCTGCAGCAGCCACCAT | |
| | CCTCCCCTTAACCTGGG | 6503 |
| | CCCAGGTTAAGGGGAGG | 6504 |
| Reduced palm itate | GCTGCAGCAAGTTCTGCATGCTTCCCTGTTCCATCCCCAGGAGCC | 6505 |
| Acyl-ACP-thioesterase | TCCCCTAAACCTGGGTAGTTAGGCAACTGGTCATCGAGTTTGAGC | |
| Cuphea palustris | CCTTCCTTGAAGCCCAAGTCAATCCCCAATG | |
| Lys24Term | CATTGGGGATTGACTTGGGCTTCAAGGAAGGGCTCAAACTCGATG | 6506 |
| AAG-TAG | ACCAGTTGCCTAACTACGCAGGTTTAGGGGAGGCTCCTGGGGATG | |
| | GAACAGGGAAGCATGCAGAACTTGCTGCAGC | |
| | AACCTGGGTAGTTAGGC | 6507 |
| | GCCTAACTACCCAGGTT | 6508 |
| Reduced palmitate | TGCATGCTTCCCTGTTCCATCCCCAGGAGCCTCCCCTAAACCTGG | 6509 |
| Acyl-ACP-thioesterase | GAAGTTAGGCAACTGATCATCGAGTTTGAGCCCTTCCTTGAAGCC | |
| Cuphea palustris | CAAGTCAATCCCCAATGGCGGATTTCAGGTT | |
| Trp28Term | AACCTGAAATCCGCCATTGGGGATTGACTTGGGCTTCAAGGAAGG | 6510 |
| TGG-TGA | GCTCAAACTCGATGATCAGTTGCCTAACTTCCCAGGTTTAGGGGA | |
| | GGCTCCTGGGGATGGAACAGGGAAGCATGCA | |
| | GGCAACTGATCATCGAG | 6511 |
| | CTCGATGATCAGTTGCC | 6512 |
| Reduced palmitate | CATGCTTCCCTGTTCCATCCCCAGGAGCCTCCCCTAAACCTGGGA | 6513 |
| Acyl-ACP-thioesterase | AGTTAGGCAACTGGTGATCGAGTTTGAGCCCTTCCTTGAAGCCCA | |
| Cuphea palustris | AGTCAATCCCCAATGGCGGATTTCAGGTTAA | |
| Ser29Term | TTAACCTGAAATCCGCCATTGGGGATTGACTTGGGCTTCAAGGAA | 6514 |
| TCA-TGA | GGGCTCAAACTCGATCACCAGTTGCCTAACTTCCCAGGTTTAGGG | |
| | GAGGCTCCTGGGGATGGAACAGGGAAGCATG | |
| | CAACTGGTGATCGAGTT | 6515 |
| | AACTCGATCACCAGTTG | 6516 |
| Reduced palmitate | ATGGTGGCTGCCGCAGCAAGTTCTGCATTCTTCTCCGTTCCAACC | 6517 |
| Acyl-ACP-thioesterase | CCGGGAATCTCCCCTTAACCCGGGAAGTTCGGTAATGGTGGCTTT | |
| Cuphea hookeriana | CAGGTTAAGGCAAACGCCAATGCCCATCCTA | |
| Lys21Term | TAGGATGGGCATTGGCGTTTGCCTTAACCTGAAAGCCACCATTAC | 6518 |
| AAA-TAA | CGAACTTCCCGGGTTAAGGGGAGATTCCCGGGGTTGGAACGGAG | |
| | AAGAATGCAGAACTTGCTGCGGCAGCCACCAT | |
| | TCTCCCCTTAACCCGGG | 6519 |
| | CCCGGGTTAAGGGGAGA | 6520 |
| Reduced palmitate | GCCGCAGCAAGTTCTGCATTCTTCTCCGTTCCAACCCCGGGAATC | 6521 |
| Acyl-ACP-thioesterase | TCCCCTAAACCCGGGTAGTTCGGTAATGGTGGCTTTCAGGTTAAG | |
| Cuphea hookeriana | GCAAACGCCAATGCCCATCCTAGTCTAAAGT | |
| Lys24Term | ACTTTAGACTAGGATGGGCATTGGCGTTTGCCTTAACCTGAAAGC | 6522 |
| AAG-TAG | CACCATTACCGAACTACCCGGGTTTAGGGGAGATTCCCGGGGTTG | |
| | GAACGGAGAAGAATGCAGAACTTGCTGCGGC | |
| | AACCCGGGTAGTTCGGT | 6523 |
| | ACCGAACTACCCGGGTT | 6524 |
| Reduced palmitate | TTCTCCGTTCCAACCCCGGGAATCTCCCCTAAACCCGGGAAGTTC | 6525 |
| Acyl-ACP-thioesterase | GGTAATGGTGGCTTTTAGGTTAAGGCAAACGCCAATGCCCATCCT | |
| Cuphea hookeriana | AGTCTAAAGTCTGGCAGCCTCGAGACTGAAG | |
| Gln31Term | CTTCAGTCTCGAGGCTGCCAGACTTTAGACTAGGATGGGCATTGG | 6526 |
| CAG-TAG | CGTTTGCCTTAACCTAAAAGCCACCATTACCGAACTTCCCGGGTTT | |
| | AGGGGAGATTCCCGGGGTTGGAACGGAGAA | |
| | GTGGCTTTTAGGTTAAG | 6527 |
| | CTTAACCTAAAAGCCAC | 6528 |
| Reduced palmitate | GTTCCAACCCCGGGAATCTCCCCTAAACCCGGGAAGTTCGGTAAT | 6529 |
| Acyl-ACP-thioesterase | GGTGGCTTTCAGGTTTAGGCAAACGCCAATGCCCATCCTAGTCTA | |
| Cuphea hookeriana | AAGTCTGGCAGCCTCGAGACTGAAGATGACA | |
| Lys33Term | TGTCATCTTCAGTCTCGAGGCTGCCAGACTTTAGACTAGGATGGG | 6530 |
| AAG-TAG | CATTGGCGTTTGCCTAAACCTGAAAGCCACCATTACCGAACTTCCC | |
| | GGGTTTAGGGGAGATTCCCGGGGTTGGAAC | |
| | TTCAGGTTTAGGCAAAC | 6531 |
| | GTTTGCCTAAACCTGAA | 6532 |
| Reduced palmitate | ATGTTGAAGCTCTCGTGTAATGCGACTGATAAGTTACAGACCCTCT | 6533 |
| Acyl-ACP-thioesterase | TCTCGCATTCTCATTAACCGGATCCGGCACACCGGAGAACCGTCT | |
| Brassica rapa | CCTCCGTGTCGTGCTCTCATCTGAGGAAAC | |
| Gln21Term | GTTTCCTCAGATGAGAGCACGACACGGAGGAGACGGTTCTCCGGT | 6534 |
| CAA-TAA | GTGCCGGATCCGGTTAATGAGAATGCGAGAAGAGGGTCTGTAACT | |
| | TATCAGTCGCATTACACGAGAGCTTCAACAT | |
| | ATTCTCATTAACCGGAT | 6535 |
| | ATCCGGTTAATGAGAAT | 6536 |
| Reduced palmitate | GCGACTGATAAGTTACAGACCCTCTTCTCGCATTCTCATCAACCGG | 6537 |
| Acyl-ACP-thioesterase | ATCCGGCACACCGGTGAACCGTCTCCTCCGTGTCGTGCTCTCATC | |
| Brassica rapa | TGAGGAAACCGGTTCTCGATCCTTTGCGAG | |
| Arg28Term | CTCGCAAAGGATCGAGAACCGGTTTCCTCAGATGAGAGCACGACA | 6538 |
| AGA-TGA | CGGAGGAGACGGTTCACCGGTGTGCCGGATCCGGTTGATGAGAA | |
| | TGCGAGAAGAGGGTCTGTAACTTATCAGTCGC | |
| | CACACCGGTGAACCGTC | 6539 |
| | GACGGTTCACCGGTGTG | 6540 |
| Reduced palmitate | CCCTCTTCTCGCATTCTCATCAACCGGATCCGGCACACCGGAGAA | 6541 |
| Acyl-ACP-thioesterase | CCGTCTCCTCCGTGTAGTGCTCTCATCTGAGGAAACCGGTTCTCG | |
| Brassica rapa | ATCCTTTGCGAGCGATCGTATCTGCTGATCA | |
| Ser24Term | TGATCAGCAGATACGATCGCTCGCAAAGGATCGAGAACCGGTTTC | 6542 |
| TCG-TAG | CTCAGATGAGAGCACTACACGGAGGAGACGGTTCTCCGGTGTGC | |
| | CGGATCCGGTTGATGAGAATGCGAGAAGAGGG | |
| | CTCCGTGTAGTGCTCTC | 6543 |
| | GAGAGCACTACACGGAG | 6544 |
| Reduced palmitate | CTTCTCGCATTCTCATCAACCGGATCCGGCACACCGGAGAACCGT | 6545 |
| Acyl-ACP-thioesterase | CTCCTCCGTGTCGTGATCTCATCTGAGGAAACCGGTTCTCGATCC | |
| Brassica rapa | TTTGCGAGCGATCGTATCTGCTGATCAAGGA | |
| Cys25Term | TCCTTGATCAGCAGATACGATCGCTCGCAAAGGATCGAGAACCGG | 6546 |
| TGC-TGA | TTTCCTCAGATGAGATCACGACACGGAGGAGACGGTTCTCCGGTG | |
| | TGCCGGATCCGGTTGATGAGAATGCGAGAAG | |
| | GTGTCGTGATCTCATCT | 6547 |
| | AGATGAGATCACGACAC | 6548 |
| Reduced palmitate | ATTCTTCTTCTATAAACCAAAACCTCAGGAACCATAAAAAAAAAAGG | 6549 |
| Acyl-ACP-thioesterase | GCATCAAAAATGTAGAAGCTTTCGTGTAATGTGACTAACAACTTAC | |
| Brassica napus | ACACCTTCTCCTTCTTCTCCGATTCCTC | |
| Leu2Term | GAGGAATCGGAGAAGAAGGAGAAGGTGTGTAAGTTGTTAGTCACA | 6550 |
| TTG-TAG | TTACACGAAAGCTTCTACATTTTTGATGCCCTTTTTTTTTTATGGTTC | |
| | CTGAGGTTTTGGTTTATAGAAGAAGAAT | |
| | AAAAATGTAGAAGCTTT | 6551 |
| | AAAGCTTCTACATTTTT | 6552 |
| Reduced palmitate | TCTTCTTCTATAAACCAAAACCTCAGGAACCATAAAAAAAAAAGGG | 6553 |
| Acyl-ACP-thioesterase | CATCAAAAATGTTGTAGCTTTCGTGTAATGTGACTAACAACTTACAC | |
| Brassica napus | ACCTTCTCCTTCTTCTCCGATTCCTCCC | |
| Lys3Term | GGGAGGAATCGGAGAAGAAGGAGAAGGTGTGTAAGTTGTTAGTCA | 6554 |
| AAG-TAG | CATTACACGAAAGCTACAACATTTTTGATGCCCTTTTTTTTTTATGG | |
| | TTCCTGAGGTTTTGGTTTATAGAAGAAGA | |
| | AAATGTTGTAGCTTTCG | 6555 |
| | CGAAAGCTACAACATTT | 6556 |
| Reduced palmitate | CTATAAACCAAAACCTCAGGAACCATAAAAAAAAAAGGGCATCAAA | 6557 |
| Acyl-ACP-thioesterase | AATGTTGAAGCTTTAGTGTAATGTGACTAACAACTTACACACCTTCT | |
| Brassica napus | CCTTCTTCTCCGATTCCTCCCTTTTCAT | |
| Ser5Term | ATGAAAAGGGAGGAATCGGAGAAGAAGGAGAAGGTGTGTAAGTT | 6558 |
| TCG-TAG | GTTAGTCACATTACACTAAAGCTTCAACATTTTTGATGCCCTTTTTT | |
| | TTTTATGGTTCCTGAGGTTTTGGTTTATAG | |
| | GAAGCTTTAGTGTAATG | 6559 |
| | CATTACACTAAAGCTTC | 6560 |
| Reduced palmitate | AAACCAAAACCTCAGGAACCATAAAAAAAAAAGGGCATCAAAAATG | 6561 |
| Acyl-ACP-thioesterase | TTGAAGCTTTCGTGAAATGTGACTAACAACTTACACACCTTCTCCTT | |
| Brassica napus | CTTCTCCGATTCCTCCCTTTTCATCCCG | |
| Cys6Term | CGGGATGAAAAGGGAGGAATCGGAGAAGAAGGAGAAGGTGTGTA | 6562 |
| TGT-TGA | AGTTGTTAGTCACATTTCACGAAAGCTTCAACATTTTTGATGCCCTT | |
| | TTTTTTTTATGGTTCCTGAGGTTTTGGTTT | |
| | CTTTCGTGAAATGTGAC | 6563 |
| | GTCACATTTCACGAAAG | 6564 |

[0276] TABLE 41
Oligonucleotides to produce plants with increased stearate

| Phenotype, Gene, | | |
|---|---|---|
| Plant & Targeted | | SEQ ID |
| Alteration | Altering Oligos | NO: |
| Increased stearate | GGGAGAGCTCTAGCTCTGTAGAAAAGAAGGATTCATTCATCATATC | 6565 |
| stearoyl-ACP | CAGAAATGGCTCTATAGTTTAACCCTTTGGTGGCATCTCAGCCTTA | |
| desaturase | CAAATTCCCTTCCTCGACTCGTCCGCCAA | |
| Arabidopsis thaliana | TTGGCGGACGAGTCGAGGAAGGGAATTTGTAAGGCTGAGATGCC | 6566 |
| Lys4Term | ACCAAAGGGTTAAACTATAGAGCCATTTCTGGATATGATGAATGAA | |
| AAG-TAG | TCCTTCTTTTCTACAGAGCTAGAGCTCTCCC | |
| | TGGCTCTATAGTTTAAC | 6567 |
| | GTTAAACTATAGAGCCA | 6568 |
| Increased stearate | CTCTGTAGAAAAGAAGGATTCATTCATCATATCCAGAAATGGCTCT | 6569 |
| stearoyl-ACP | AAAGTTTAACCCTTAGGTGGCATCTCAGCCTTACAAATTCCCTTCC | |
| desaturase | TCGACTCGTCCGCCAACTCCTTCTTTCAG | |
| Arabidopsis thaliana | CTGAAAGAAGGAGTTGGCGGACGAGTCGAGGAAGGGAATTTGTA | 6570 |
| Leu8Term | AGGCTGAGATGCCACCTAAGGGTTAAACTTTAGAGCCATTTCTGG | |
| TTG-TAG | ATATGATGAATGAATCCTTCTTTTCTACAGAG | |
| | TAACCCTTAGGTGGCAT | 6571 |
| | ATGCCACCTAAGGGTTA | 6572 |
| Increased stearate | AGAAGGATTCATTCATCATATCCAGAAATGGCTCTAAAGTTTAACC | 6573 |
| stearoyl-ACP | CTTTGGTGGCATCTTAGCCTTACAAATTCCCTTCCTCGACTCGTCC | |
| desaturase | GCCAACTCCTTCTTTCAGATCTCCCAAGT | |
| Arabidopsis thaliana | ACTTGGGAGATCTGAAAGAAGGAGTTGGCGGACGAGTCGAGGAA | 6574 |
| Gln12Term | GGGAATTTGTAAGGCTAAGATGCCACCAAAGGGTTAAACTTTAGA | |
| CAG-TAG | GCCATTTCTGGATATGATGAATGAATCCTTCT | |
| | TGGCATCTTAGCCTTAC | 6575 |
| | GTAAGGCTAAGATGCCA | 6576 |
| Increased stearate | TCATTCATCATATCCAGAAATGGCTCTAAAGTTTAACCCTTTGGTG | 6577 |
| stearoyl-ACP | GCATCTCAGCCTTAGAAATTCCCTTCCTCGACTCGTCCGCCAACTC | |
| desaturase | CTTCTTTCAGATCTCCCAAGTTCCTCTGC | |
| Arabidopsis thaliana | GCAGAGGAACTTGGGAGATCTGAAAGAAGGAGTTGGCGGACGAG | 6578 |
| Phe14Term | TCGAGGAAGGGAATTTCTAAGGCTGAGATGCCACCAAAGGGTTAA | |
| TAC-TAG | ACTTTAGAGCCATTTCTGGATATGATGAATGA | |
| | CAGCCTTAGAAATTCCC | 6579 |
| | GGGAATTTCTAAGGCTG | 6580 |
| Increased stearate | GAGAGCTCGCTCGTGTCTGAAAGAACATCAAACCTCGTATCAAAAA | 6581 |
| stearoyl-ACP | AAAGAAAATGGCATAGAAGCTTAACCCTTTGGCATCTCAGCCTTAC | |
| desaturase | AAACTCCCTTCCTCGGCTCGTCCGCCAAT | |
| Brassica napus | ATTGGCGGACGAGCCGAGGAAGGGAGTTTGTAAGGCTGAGATGC | 6582 |
| Leu3Term | CAAAGGGTTAAGCTTCTATGCCATUTCTTTTTTTTGATACGAGGTT | |
| TTG-TAG | TGATGTTCTTTCAGACACGAGCGAGCTCTC | |
| | AATGGCATAGAAGCTTA | 6583 |
| | TAAGCTTCTATGCCATT | 6584 |
| Increased stearate | GAGCTCGCTCGTGTCTGAAAGAACATCTAAACCTCGTATCAAAAAAA | 6585 |
| stearoyl-ACP | AGAAAATGGCATTGTAGCTTAACCCTTTGGCATCTCAGCCTTACAA | |
| desaturase | ACTCCCTTCCTCGGCTCGTCCGCCAATCT | |
| Brassica napus | AGATTGGCGGACGAGCCGAGGAAGGGAGTTTGTAAGGCTGAGAT | 6586 |
| Lys4Term | GCCAAAGGGTTAAGCTACAATGCCATTTTCTTTTTTTTGATACGAG | |
| AAG-TAG | GTTTGATGTTCTTTCAGACACGAGCGAGCTC | |
| | TGGCATTGTAGCTTAAC | 6587 |
| | GTTAAGCTACAATGCCA | 6588 |
| Increased stearate | TCTGAAAGAACATCAAACCTCGTATCAAAAAAAAGAAAATGGCATT | 6589 |
| stearoyl-ACP | GAAGCTTAACCCTTAGGCATCTCAGCCTTACAAACTCCCTTCCTCG | |
| desaturase | GCTCGTCCGCCAATCTCTACTCTCAGATC | |
| Brassica napus | GATCTGAGAGTAGAGATTGGCGGACGAGCCGAGGAAGGGAGTTT | 6590 |
| Leu8Term | GTAAGGCTGAGATGCCTAAGGGTTAAGCTTCAATGCCATTTTCTTT | |
| TTG-TAG | TTTTTGATACGAGGTTTGATGTTCTTTCAGA | |
| | TAACCCTTAGGCATCTC | 6591 |
| | GAGATGCCTAAGGGTTA | 6592 |
| Increased stearate | AACATCAAACCTCGTATCAAAAAAAAGAAAATGGCATTGAAGCTTA | 6593 |
| stearoyl-ACP | ACCCTTTGGCATCTTAGCCTTACAAACTCCCTTCCTCGGCTCGTCC | |
| desaturase | GCCAATCTCTACTCTCAGATCTCCCAAGT | |
| Brassica napus | ACTTGGGAGATCTGAGAGTAGAGATTGGCGGACGAGCCGAGGAA | 6594 |
| Gln11Term | GGGAGTTTGTAAGGCTAAGATGCCAAAGGGTTAAGCTTCAATGCC | |
| CAG-TAG | ATTTTCTTTTTTTTGATACGAGGTTTGATGTT | |
| | TGGCATCTTAGCCTTAC | 6595 |
| | GTAAGGCTAAGATGCCA | 6596 |
| Increased stearate | AACCAAAAGAAAAAGGTAAGAAAAAAAACAATGGCTCTCAAGCTCA | 6597 |
| stearoyl-ACP | ATCCTTTCCTTTCTTAAACCCAAAAGTTACCTTCTTTCGCTCTTCCA | |
| desaturase | CCAATGGCCAGTACCAGATCTCCTAAGT | |
| Ricinus communis | ACTTAGGAGATCTGGTACTGGCCATTGGTGGAAGAGCGAAAGAAG | 6598 |
| Gln27Term | GTAACTTTTGGGTTTAAGAAAGGAAAGGATTGAGCTTGAGAGCCAT | |
| CAA-TAA | TGTTTTTTTTCTTACCTTTTTCTTTTGGTT | |
| | TCCTTTCTTAAACCCAA | 6599 |
| | TTGGGTTTAAGAAAGGA | 6600 |
| Increased stearate | AAGAAAAAGGTAAGAAAAAAAACAATGGCTCTCAAGCTCAATCCTT | 6601 |
| stearoyl-ACP | TCCTTTCTCAAACCTAAAAGTTACCTTCTTTCGCTCTTCCACCAATG | |
| desaturase | GCCAGTACCAGATCTCCTAAGTTCTACA | |
| Ricinus communis | GTAGAACTTAGGAGATCTGGTACTGGCCATTGGTGGAAGAGCGA | 6602 |
| Gln29Term | AAGAAGGTAACTTTTAGGTTTGAGAAAGGAAAGGATTGAGCTTGA | |
| CAA-TAA | GAGCCATTGTTTTTTTTCTTACCTTTTTCTT | |
| | CTCAAACCTAAAAGTTA | 6603 |
| | TAACTTTTAGGTTTGAG | 6604 |
| Increased stearate | AAAAAGGTAAGAAAAAAAACAATGGCTCTCAAGCTCAATCCTTTCC | 6605 |
| stearoyl-ACP | TTTCTCAAACCCAATAGTTACCTTCTTTCGCTCTTCCACCAATGGCC | |
| desaturase | AGTACCAGATCTCCTAAGTTCTACATGG | |
| Ricinus communis | CCATGTAGAACTTAGGAGATCTGGTACTGGCCATTGGTGGAAGAG | 6606 |
| Lys30Term | CGAAAGAAGGTAACTATTGGGTTTGAGAAAGGAAAGGATTGAGCT | |
| AAG-TAG | TGAGAGCCATTGTTTTTTTTCTTACCTTTTT | |
| | AAACCCAATAGTTACCT | 6607 |
| | AGGTAACTATTGGGTTT | 6608 |
| Increased stearate | TCTCAAACCCAAAAGTTACCTTCTTTCGCTCTTCCACCAATGGCCA | 6609 |
| stearoyl-ACP | GTACCAGATCTCCTTAGTTCTACATGGCCTCTACCCTCAAGTCTGG | |
| desaturase | TTCTAAGGAAGTTGAGAATCTCAAGAAGC | |
| Ricinus communis | GCTTCTTGAGATTCTCAACTTCCTTAGAACCAGACTTGAGGGTAGA | 6610 |
| Lys46Term | GGCCATGTAGAACTAAGGAGATCTGGTACTGGCCATTGGTGGAAG | |
| AAG-TAG | AGCGAAAGAAGGTAACTTTTGGGTTTGAGA | |
| | GATCTCCTTAGTTCTAC | 6611 |
| | GTAGAACTAAGGAGATC | 6612 |
| Increased stearate | TCTTCTGATTCATTTAATCTTTACTCATCAATGGCTCTGAGACTGAA | 6613 |
| stearoyl-ACP | CCCTATCCCCACCTAAACCTTCTCCCTCCCCCAAATGGCCAGTCTC | |
| desaturase | AGATCTCCCAGGTTCCGCATGGCCTCTA | |
| Glycine max | TAGAGGCCATGCGGAACCTGGGAGATCTGAGACTGGCCATTTGG | 6614 |
| Gln11Term | GGGAGGGAGAAGGTTTAGGTGGGGATAGGGTTCAGTCTCAGAGC | |
| CAA-TAA | CATTGATGAGTAAAGATTAAATGAATCAGAAGA | |
| | TCCCCACCTAAACCTTC | 6615 |
| | GAAGGTTTAGGTGGGGA | 6616 |
| Increased stearate | CTTTACTCATCAATGGCTCTGAGACTGAACCCTATCCCCACCCAAA | 6617 |
| stearoyl-ACP | CCTTCTCCCTCCCCTAAATGGCCAGTCTCAGATCTCCCAGGTTCC | |
| desaturase | GCATGGCCTCTACCCTCCGCTCCGGTTCCA | |
| Glycine max | TGGAACCGGAGCGGAGGGTAGAGGCCATGCGGAACCTGGGAGAT | 6618 |
| Gln11Term | CTGAGACTGGCCATTTAGGGGAGGGAGAAGGTTTGGGTGGGGAT | |
| CAA-TAA | AGGGTTCAGTCTCAGAGCCATTGATGAGTAAAG | |
| | CCCTCCCCTAAATGGCC | 6619 |
| | GGCCATTTAGGGGAGGG | 6620 |
| Increased stearate | GCTCTGAGACTGAACCCTATCCCCACCCAAACCTTCTCCCTCCCC | 6621 |
| stearoyl-ACP | CAAATGGCCAGTCTCTGATCTCCCAGGTTCCGCATGGCCTCTACC | |
| desaturase | CTCCGCTCCGGTTCCAAAGAGGTTGAAAATA | |
| Glycine max | TATTTTCAACCTCTTTGGAACCGGAGCGGAGGGTAGAGGCCATGC | 6622 |
| Arg22Term | GGAACCTGGGAGATCAGAGACTGGCCATTTGGGGGAGGGAGAAG | |
| AGA-TGA | GTTTGGGTGGGGATAGGGTTCAGTCTCAGAGC | |
| | CCAGTCTCTGATCTCCC | 6623 |
| | GGGAGATCAGAGACTGG | 6624 |
| Increased stearate | CAAATGGCCAGTCTCAGATCTCCCAGGTTCCGCATGGCCTCTACC | 6625 |
| stearoyl-ACP | CTCCGCTCCGGTTCCTAAGAGGTTGAAAATATTAAGAAGCCATTCA | |
| desaturase | CTCCTCCCAGAGAAGTGCATGTTCAAGTAA | |
| Glycine max | TTACTTGAACATGCACTTCTCTGGGAGGAGTGAATGGCTTCTTAAT | 6626 |
| Lys37Term | ATTTTCAACCTCTTAGGAACCGGAGCGGAGGGTAGAGGCCATGCG | |
| AAA-TAA | GAACCTGGGAGATCTGAGACTGGCCATTTG | |
| | CCGGTTCCTAAGAGGTT | 6627 |
| | AACCTCTTAGGAACCGG | 6628 |
| Increased stearate | CAACAAGCACACACAAGAACAACATCAACAATGGCGATTCGCATC | 6629 |
| stearoyl-ACP | AATACGGCGACGTTTTAATCAGACCTGTACCGTTCATTCGCGTTTC | |
| desaturase | CTCAACCGAAACCTCTCAGATCTCCCAAAT | |
| Helianthus annuus | ATTTGGGAGATCTGAGAGGTTTCGGTTGAGGAAACGCGAATGAAC | 6630 |
| Gln11Term | GGTACAGGTCTGATTAAAACGTCGCCGTATTGATGCGAATCGCCA | |
| CAA-TAA | TTGTTGATGTTGTTCTTGTGTGTGCTTGTTG | |
| | CGACGTTTTAATCAGAC | 6631 |
| | GTCTGATTAAAACGTCG | 6632 |
| Increased stearate | AAGCACACACAAGAACAACATCAACAATGGCGATTCGCATCAATAC | 6633 |
| stearoyl-ACP | GGCGACGTTTCAATGAGACCTGTACCGTTCATTCGCGTTTCCTCAA | |
| desaturase | CCGAAACCTCTCAGATCTCCCAAATTCGC | |
| Helianthus annuus | GCGAATTTGGGAGATCTGAGAGGTTTCGGTTGAGGAAACGCGAAT | 6634 |
| Ser12Term | GAACGGTACAGGTCTCATTGAAACGTCGCCGTATTGATGCGAATC | |
| TCA-TGA | GCCATTGTTGATGTTGTTCTTGTGTGTGCTT | |
| | GTTTCAATGAGACCTGT | 6635 |
| | ACAGGTCTCATTGAAAC | 6636 |
| Increased stearate | AAGAACAACATCAACAATGGCGATTCGCATCAATACGGCGACGTTT | 6637 |
| stearoyl-ACP | CAATCAGACCTGTAGCGTTCATTCGCGTTTCCTCAACCGAAACCTC | |
| desaturase | TCAGATCTCCCAAATTCGCCATGGCTTCC | |
| Helianthus annuus | GGAAGCCATGGCGAATTTGGGAGATCTGAGAGGTTTCGGTTGAGG | 6638 |
| Tyr15Term | AAACGCGAATGAACGCTACAGGTCTGATTGAAACGTCGCCGTATT | |
| TAC-TAG | GATGCGAATCGCCATTGTTGATGTTGTTCTT | |
| | GACCTGTAGCGTTCATT | 6639 |
| | AATGAACGCTACAGGTC | 6640 |
| Increased stearate | CAACATCAACAATGGCGATTCGCATCAATACGGCGACGTTTCAATC | 6641 |
| stearoyl-ACP | AGACCTGTACCGTTGATTCGCGTTTCGTCAACCGAAACCTCTCAGA | |
| desaturase | TCTCCCAAATTCGCCATGGCTTCCACCAT | |
| Helianthus annuus | ATGGTGGAAGCCATGGCGAATTTGGGAGATCTGAGAGGTTTCGGT | 6642 |
| Ser17Term | TGAGGAAACGCGAATCAACGGTACAGGTCTGATTGAAACGTCGCC | |
| TCA-TGA | GTATTGATGCGAATCGCCATTGTTGATGTTG | |
| | GTACCGTTGATTCGCGT | 6643 |
| | ACGCGAATCAACGGTAC | 6644 |
| Increased stearate | ACACACAACACACACTCAATCACACACACATCATCATCTTCTTCATC | 6645 |
| stearoyl-ACP | AACGATGGCGCTTTGAATGAGTCCGGTGACGCTTCAACGGGAGAT | |
| desaturase | ATATCCTTCATACACTTTTCATCAATCGA | |
| Helianthus annuus | TCGATTGATGAAAAGTGTATGAAGGATATATCTCCCGTTGAAGCGT | 6646 |
| Arg4Term | CACCGGACTCATTCAAAGCGCCATCGTTGATGAAGAAGATGATGA | |
| CGA-TGA | TGTGTGTGTGATTGAGTGTGTGTTGTGTGT | |
| | TGGCGCTTTGAATGAGT | 6647 |
| | ACTCATTCAAAGCGCCA | 6648 |
| Increased stearate | ACACACACATCATCATCTTCTTCATCAACGATGGCGCTTCGAATGA | 6649 |
| stearoyl-ACP | GTCCGGTGACGCTTTAACGGGAGATATATCCTTCATACACTTTTCA | |
| desaturase | TCAATCGAAAAATCTCAGATCTCCTAAAT | |
| Helianthus annuus | ATTTAGGAGATCTGAGATTTTTCGATTGATGAAAAGTGTATGAAGG | 6650 |
| Gln11Term | ATATATCTCCCGTTAAAGCGTCACCGGACTCATTCGAAGCGCCATC | |
| CAA-TAA | GTTGATGAAGAAGATGATGATGTGTGTGT | |
| | TGACGCTTTAACGGGAG | 6651 |
| | CTCCCGTTAAAGCGTCA | 6652 |
| Increased stearate | ACATCATCATCTTCTTCATCAACGATGGCGCTTCGAATGAGTCCGG | 6653 |
| stearoyl-ACP | TGACGCTTCAACGGTAGATATATCCTTCATACACTTTTCATCAATCG | |
| desaturase | AAAAATCTCAGATCTCCTAAATTCGCGA | |
| Helianthus annuus | TCGCGAATTTAGGAGATCTGAGATTTTTCGATTGATGAAAAGTGTA | 6654 |
| Glu13Term | TGAAGGATATATCTACCGTTGAAGCGTCACCGGACTCATTCGAAG | |
| GAG-TAG | CGCCATCGTTGATGAAGAAGATGATGATGT | |
| | TTCAACGGTAGATATAT | 6655 |
| | ATATATCTACCGTTGAA | 6656 |
| Increased stearate | ATCTTCTTCATCAACGATGGCGCTTCGAATGAGTCCGGTGACGCTT | 6657 |
| stearoyl-ACP | CAACGGGAGATATAGCCTTCATACACTTTTCATCAATCGAAAAATC | |
| desaturase | TCAGATCTCCTAAATTCGCGATGGCTTCC | |
| Helianthus annuus | GGAAGCCATCGCGAATTTAGGAGATCTGAGATTTTTCGATTGATGA | 6658 |
| Tyr15Term | AAAGTGTATGAAGGCTATATCTCCCGTTGAAGCGTCACCGGACTC | |
| TAT-TAG | ATTCGAAGCGCCATCGTTGATGAAGAAGAT | |
| | GAGATATAGCCTTCATA | 6659 |
| | TATGAAGGCTATATCTC | 6660 |
| Increased stearate | AACTCAGCCAGCTTGCCCCCAAACAACAGCGCAGAAAAACCTTCA | 6661 |
| stearoyl-ACP | ACAACAATGGCTCTCTAGCTCAACCCAGTCACCACCTTCCCTTCAA | |
| desaturase | CACGCTCCCTCAACAACTTCTCCTCCAGAT | |
| Linum usitatissimum | ATCTGGAGGAGAAGTTGTTGAGGGAGCGTGTTGAAGGGAAGGTG | 6662 |
| Lys4Term | GTGACTGGGTTGAGCTAGAGAGCCATTGTTGTTGAAGGTTTTTCT | |
| AAG-TAG | GCGCTGTTGTTTGGGGGCAAGCTGGCTGAGTT | |
| | TGGCTCTCTAGCTCAAC | 6663 |
| | GTTGAGCTAGAGAGCCA | 6664 |
| Increased stearate | GCGCAGAAAAACCTTCAACAACAATGGCTCTCAAGCTCAACCCAG | 6665 |
| stearoyl-ACP | TCACCACCTTCCCTTGAACACGCTCCCTCAACAACTTCTCCTCCAG | |
| desaturase | ATCTCCTCGCACCTTTCTCATGGCTGCTTC | |
| Linum usitatissimum | GAAGCAGCCATGAGAAAGGTGCGAGGAGATCTGGAGGAGAAGTT | 6666 |
| Ser13Term | GTTGAGGGAGCGTGTTCAAGGGAAGGTGGTGACTGGGTTGAGCT | |
| TCA-TGA | TGAGAGCCATTGTTGTTGAAGGTTTTTCTGCGC | |
| | CTTCCCTTGAACACGCT | 6667 |
| | AGCGTGTTCAAGGGAAG | 6668 |
| Increased stearate | CTCAAGCTCAACCCAGTCACCACCTTCCCTTCAACACGCTCCCTCA | 6669 |
| stearoyl-ACP | ACAACTTCTCCTCCTGATCTCCTCGCACCTTTCTCATGGCTGCTTC | |
| desaturase | CACTTTCAATTCCACCTCCACCAAGTAAG | |
| Linum usitatissimum | CTTACTTGGTGGAGGTGGAATTGAAAGTGGAAGCAGCCATGAGAA | 6670 |
| Arg23Term | AGGTGCGAGGAGATCAGGAGGAGAAGTTGTTGAGGGAGCGTGTT | |
| AGA-TGA | GAAGGGAAGGTGGTGACTGGGTTGAGCTTGAG | |
| | TCTCCTCCTGATCTCCT | 6671 |
| | AGGAGATCAGGAGGAGA | 6672 |
| Increased stearate | TCCTCCAGATCTCCTCGCACCTTTCTCATGGCTGCTTCCACTTTCA | 6673 |
| stearoyl-ACP | ATTCCACCTCCACCTAGTAAGCATCTCCTCCTCCTCGGAATCTCCG | |
| desaturase | CCGATTTCTTTTAAGCGATTGATCGTAGA | |
| Linum usitatissimum | TCTACGATCAATCGCTTAAAAGAAATCGGCGGAGATTCCGAGGAG | 6674 |
| Lys41Term | GAGGAGATGCTTACTAGGTGGAGGTGGAATTGAAAGTGGAAGCA | |
| AAG-TAG | GCCATGAGAAAGGTGCGAGGAGATCTGGAGGA | |
| | CCTCCACCTAGTAAGCA | 6675 |
| | TGCTTACTAGGTGGAGG | 6676 |
| Increased stearate | ATGGCACTGAAACTTTGCTTTCCACCCCACAAGATGCCTTCCTTCC | 6677 |
| stearoyl-ACP | CCGATGCTCGTATCTGATCTCACAGGGTTTTCATGGCTTCAACTAT | |
| desaturase | TCATTCTCCTTCTATGGAGGTCGGAAAAG | |
| Olea europaea | CTTTTCCGACCTCCATAGAAGGAGAATGAATAGTTGAAGCCATGAA | 6678 |
| Arg21Term | AACCCTGTGAGATCAGATACGAGCATCGGGGAAGGAAGGCATCTT | |
| AGA-TGA | GTGGGGTGGAAAGCAAAGTTTCAGTGCCAT | |
| | CTCGTATCTGATCTCAC | 6679 |
| | GTGAGATCAGATACGAG | 6680 |
| Increased stearate | CCCACAAGATGCCTTCCTTCCCCGATGCTCGTATCAGATCTCACAG | 6681 |
| stearoyl-ACP | GGTTTTCATGGCTTGAACTATTCATTCTCCTTCTATGGAGGTCGGA | |
| desaturase | AAAGTTAAAAAGCCTTTCACGCCTCCACG | |
| Olea europaea | CGTGGAGGCGTGAAAGGCTTTTTAACTTTTCCGACCTCCATAGAA | 6682 |
| Ser29Term | GGAGAATGAATAGTTCAAGCCATGAAAACCCTGTGAGATCTGATAC | |
| TCA-TGA | GAGCATCGGGGAAGGAAGGCATCTTGTGGG | |
| | CATGGCTTGAACTATTC | 6683 |
| | GAATAGTTCAAGCCATG | 6684 |
| Increased stearate | GATGCTCGTATCAGATCTCACAGGGTTTTCATGGCTTCAACTATTC | 6685 |
| stearoyl-ACP | ATTCTCCTTCTATGTAGGTCGGAAAAGTTAAAAAGCCTTTCACGCC | |
| desaturase | TCCACGAGAGGTACATGTTCAAGTAACCC | |
| Olea europaea | GGGTTACTTGAACATGTACCTCTCGTGGAGGCGTGAAAGGCTTTT | 6686 |
| Glu37Term | TAACTTTTCCGACCTACATAGAAGGAGAATGAATAGTTGAAGCCAT | |
| GAG-TAG | GAAAACCCTGTGAGATCTGATACGAGCATC | |
| | CTTCTATGTAGGTCGGA | 6687 |
| | TCCGACCTACATAGAAG | 6688 |
| Increased stearate | CGTATCAGATCTCACAGGGTTTTCATGGCTTCAACTATTCATTCTC | 6689 |
| stearoyl-ACP | CTTCTATGGAGGTCTGAAAAGTTAAAAAGCCTTTCACGCCTCCACG | |
| desaturase | AGAGGTACATGTTCAAGTAACCCATTCCT | |
| Olea europaea | AGGAATGGGTTACTTGAACATGTACCTCTCGTGGAGGCGTGAAAG | 6690 |
| Gly39Term | GCTTTTTAACTTTTCAGACCTCCATAGAAGGAGAATGAATAGTTGA | |
| GGA-TGA | AGCCATGAAAACCCTGTGAGATCTGATACG | |
| | TGGAGGTCTGAAAAGTT | 6691 |
| | AACTTTTCAGACCTCCA | 6692 |
| Increased stearate | TTCTCGTTTTTGTCGTCCCCTCTGCTCTCTCTCTCTATCAGGCACG | 6693 |
| stearoyl-ACP | GAGAAATGGCACTGTAACTCAGTCCAGTCATGTTTCAATCTCAGAA | |
| desaturase | GCTTCCATTTCTTGCCTCCTATCCGCCTT | |
| Persea americana | AAGGCGGATAGGAGGCAAGAAATGGAAGCTTCTGAGATTGAAACA | 6694 |
| Lys4Term | TGACTGGACTGAGTTACAGTGCCATTTCTCCGTGCCTGATAGAGA | |
| AAA-TAA | GAGAGAGCAGAGGGGACGACAAAAACGAGAA | |
| | TGGCAGTGTAACTCAGT | 6695 |
| | ACTGAGTTACAGTGCCA | 6696 |
| Increased stearate | CTGCTCTCTCTCTCTATCAGGCACGGAGAAATGGCACTGAAACTCA | 6697 |
| stearoyl-ACP | GTCCAGTCATGTTTTAATCTCAGAAGCTTCCATTTCTTGCCTCCTAT | |
| desaturase | CCGCCTTCCAATCTCAGATCTCCGAGGG | |
| Persea americana | CCCTCGGAGATCTGAGATTGGAAGGCGGATAGGAGGCAAGAAAT | 6698 |
| Gln11Term | GGAAGCTTCTGAGATTAAAACATGACTGGACTGAGTTTCAGTGCC | |
| CAA-TAA | ATTTCTCCGTGCCTGATAGAGAGAGAGAGCAG | |
| | TCATGTTTTAATCTCAG | 6699 |
| | CTGAGATTAAAACATGA | 6700 |
| Increased stearate | TCTCTCTCTATCAGGCACGGAGAAATGGCACTGAAACTCAGTCCA | 6701 |
| stearoyl-ACP | GTCATGTTTCAATCTTAGAAGCTTCCATTTCTTGCCTCCTATCCGCC | |
| desaturase | TTCCAATCTCAGATCTCCGAGGGTTTTCA | |
| Persea americana | TGAAAACCCTCGGAGATCTGAGATTGGAAGGCGGATAGGAGGCAA | 6702 |
| Gln13Term | GAAATGGAAGCTTCTAAGATTGAAACATGACTGGACTGAGTTTCAG | |
| CAG-TAG | TGCCATTTCTCCGTGCCTGATAGAGAGAGA | |
| | TTCAATCTTAGAAGCTT | 6703 |
| | AAGCTTCTAAGATTGAA | 6704 |
| Increased stearate | CTCTCTATCAGGCACGGAGAAATGGCACTGAAACTCAGTCCAGTC | 6705 |
| stearoyl-ACP | ATGTTTCAATCTCAGTAGCTTCCATTTCTTGCCTCCTATCCGCCTTC | |
| desaturase | CAATCTCAGATCTCCGAGGGTTTTCATGG | |
| Persea americana | CCATGAAAACCCTCGGAGATCTGAGATTGGAAGGCGGATAGGAG | 6706 |
| Lys14Term | GCAAGAAATGGAAGCTACTGAGATTGAAACATGACTGGACTGAGT | |
| AAG-TAG | TTCAGTGCCATTTCTCCGTGCCTGATAGAGAG | |
| | AATCTCAGTAGCTTCCA | 6707 |
| | TGGAAGCTACTGAGATT | 6708 |
| Increased stearate | CCCCGAGATCTCGCTGCCGCTGCTCATGGCGTTCGCGGCGTCCC | 6709 |
| stearoyl-ACP | ACACCGCATCGCCGTAGTCCTGCGGCGGCGTGGCGCAGAGGAG | |
| desaturase | GAGCAATGGGATGTCGAAGATGGTGGCCATGGCC | |
| Oryza sativa | GGCCATGGCCACCATCTTCGACATCCCATTGCTCCTCCTCTGCGC | 6710 |
| Tyr12Term | CACGCCGCCGCAGGACTACGGCGATGCGGTGTGGGACGCCGCG | |
| TAC-TAG | AACGCCATGAGCAGCGGCAGCGAGATCTCGGGG | |
| | TCGCCGTAGTCCTGCGG | 6711 |
| | CCGCAGGACTACGGCGA | 6712 |
| Increased stearate | CTGCTCATGGCGTTCGCGGCGTCCCACACCGCATCGCCGTACTCC | 6713 |
| stearoyl-ACP | TGCGGCGGCGTGGCGTAGAGGAGGAGCAATGGGATGTCGAAGAT | |
| desaturase | GGTGGCCATGGCCTCCACCATCAACAGGGTCA | |
| Oryza sativa | TGACCCTGTTGATGGTGGAGGCCATGGCCACCATCTTCGACATCC | 6714 |
| Gln19Term | CATTGCTCCTCCTCTACGCCACGCCGCCGCAGGAGTACGGCGAT | |
| CAG-TAG | GCGGTGTGGGACGCCGCGAACGCCATGAGCAG | |
| | GCGTGGCGTAGAGGAGG | 6715 |
| | CCTCCTCTACGCCACGC | 6716 |
| Increased stearate | CCCACACCGCATCGCCGTACTCCTGCGGCGGCGTGGCGCAGAGG | 6717 |
| stearoyl-ACP | AGGAGCAATGGGATGTAGAAGATGGTGGCCATGGCCTCCACCAT | |
| desaturase | CAACAGGGTCAAGACTGCTAAGAAGCCCTACAC | |
| Oryza sativa | GTGTAGGGCTTCTTAGCAGTCTTGACCCTGTTGATGGTGGAGGCC | 6718 |
| Ser26Term | ATGGCCACCATCTTCTACATCCCATTGCTCCTCCTCTGCGCCACGC | |
| TCG-TAG | CGCCGCAGGAGTACGGCGATGCGGTGTGGG | |
| | TGGGATGTAGAAGATGG | 6719 |
| | CCATCTTCTACATCCCA | 6720 |
| Increased stearate | CACACCGCATCGCCGTACTCCTGCGGCGGCGTGGCGCAGAGGAG | 6721 |
| stearoyl-ACP | GAGCAATGGGATGTCGTAGATGGTGGCCATGGCCTCCACCATCAA | |
| desaturase | CAGGGTCAAGACTGCTAAGAAGCCCTACACTC | |
| Oryza sativa | GAGTGTAGGGCTTCTTAGCAGTCTTGACCCTGTTGATGGTGGAGG | 6722 |
| Lys21Term | CCATGGCCACCATCTACGACATCCCATTGCTCCTCCTCTGCGCCA | |
| AAG-TAG | CGCCGCCGCAGGAGTACGGCGATGCGGTGTG | |
| | GGATGTCGTAGATGGTG | 6723 |
| | CACCATCTACGACATCC | 6724 |
| Increased stearate | TTCTCTCTCTAGGTTGAGCGGTTACCAACAGAAGCACTTAGGAGA | 6725 |
| stearoyl-ACP | GAGAAGCAATGGCGTAGAAGCTTCACCACACGGCCTTCAATCCTT | |
| desaturase | CCATGGCGGTTACCTCTTCGGGACTTCCTCG | |
| Simmondsia chinensis | CGAGGAAGTCCCGAAGAGGTAACCGCCATGGAAGGATTGAAGGC | 6726 |
| Leu3Term | CGTGTGGTGAAGCTTCTACGCCATTGCTTCTCTCTCCTAAGTGCTT | |
| TTG-TAG | CTGTTGGTAACCGCTCAACCTAGAGAGAGAA | |
| | AATGGCGTAGAAGCTTC | 6727 |
| | GAAGCTTCTACGCCATT | 6728 |
| Increased stearate | CTCTCTCTAGGTTGAGCGGTTACCAACAGAAGCACTTAGGAGAGA | 6729 |
| stearoyl-ACP | GAAGCAATGGCGTTGTAGCTTCACCACACGGCCTTCAATCCTTCC | |
| desaturase | ATGGCGGTTACCTCTTCGGGACTTCCTCGAT | |
| Simmondsia chinensis | ATCGAGGAAGTCCCGAAGAGGTAACCGCCATGGAAGGATTGAAG | 6730 |
| Lys4Term | GCCGTGTGGTGAAGCTACAACGCCATTGCTTCTCTCTCCTAAGTG | |
| AAG-TAG | CTTCTGTTGGTAACCGCTCAACCTAGAGAGAG | |
| | TGGCGTTGTAGCTTCAC | 6731 |
| | GTGAAGCTACAACGCCA | 6732 |
| Increased stearate | AAGCAATGGCGTTGAAGCTTCACCACACGGCCTTCAATCCTTCCAT | 6733 |
| stearoyl-ACP | GGCGGTTACCTCTTAGGGACTTCCTCGATCGTATCACCTCAGATCT | |
| desaturase | CACCGCGTTTTCATGGCTTCTTCTACAAT | |
| Simmondsia chinensis | ATTGTAGAAGAAGCCATGAAAACGCGGTGAGATCTGAGGTGATAC | 6734 |
| Ser19Term | GATCGAGGAAGTCCCTAAGAGGTAACCGCCATGGAAGGATTGAAG | |
| TCG-TAG | GCCGTGTGGTGAAGCTTCAACGCCATTGCTT | |
| | TACCTCTTAGGGACTTC | 6735 |
| | GAAGTCCCTAAGAGGTA | 6736 |
| Increased stearate | GCAATGGCGTTGAAGCTTCACCACACGGCCTTCAATCCTTCCATG | 6737 |
| stearoyl-ACP | GCGGTTACCTCTTCGTGACTTCCTCGATCGTATCACCTCAGATCTC | |
| desaturase | ACCGCGTTTTCATGGCTTCTTCTACAATTG | |
| Simmondsia chinensis | CAATTGTAGAAGAAGCCATGAAAACGCGGTGAGATCTGAGGTGAT | 6738 |
| Gly20Term | ACGATCGAGGAAGTCACGAAGAGGTAACCGCCATGGAAGGATTG | |
| GGA-TGA | AAGGCCGTGTGGTGAAGCTTCAACGCCATTGC | |
| | CCTCTTCGTGACTTCCT | 6739 |
| | AGGAAGTCACGAAGAGG | 6740 |
| Increased stearate | TGGCTCTGAATCTCAACCCCGTTTCCACACCATTTCAGTGTCGTCG | 6741 |
| stearoyl-ACP | ATTGCCGTCTTTCTGACCTCGTCAAACGCCTTCTCGCAGATCTCCC | |
| desaturase | AAATTCTTCATGGCTTCCACTCTCAGCAG | |
| Spinacia oleracea | CTGCTGAGAGTGGAAGCCATGAAGAATTTGGGAGATCTGCGAGAA | 6742 |
| Ser21Term | GGCGTTTGACGAGGTCAGAAAGACGGCAATCGACGACACTGAAAT | |
| TCA-TGA | GGTGTGGAAACGGGGTTGAGATTCAGAGCCA | |
| | GTCTTTCTGACCTCGTC | 6743 |
| | GACGAGGTCAGAAAGAC | 6744 |
| Increased stearate | AATCTCAACCCCGTTTCCACACCATTTCAGTGTCGTCGATTGCCGT | 6745 |
| stearoyl-ACP | CTTTCTCACCTCGTTAAACGCCTTCTCGCAGATCTCCCAAATTCTT | |
| desaturase | CATGGCTTCCACTCTCAGCAGCTCTTCTC | |
| Spinacia oleracea | GAGAAGAGCTGCTGAGAGTGGAAGCCATGAAGAATTTGGGAGATC | 6746 |
| Gln24Term | TGCGAGAAGGCGTTTAACGAGGTGAGAAAGACGGCAATCGACGA | |
| CAA-TAA | CACTGAAATGGTGTGGAAACGGGGTTGAGATT | |
| | CACCTCGTTAAACGCCT | 6747 |
| | AGGCGTTTAACGAGGTG | 6748 |
| Increased stearate | TCCACACCATTTCAGTGTCGTCGATTGCCGTCTTTCTCACCTCGTC | 6749 |
| stearoyl-ACP | AAACGCCTTCTCGCTGATCTCCCAAATTCTTCATGGCTTCCACTCT | |
| desaturase | CAGCAGCTCTTCTCCTAAGGAAGCGGAAA | |
| Spinacia oleracea | TTTCCGCTTCCTTAGGAGAAGAGCTGCTGAGAGTGGAAGCCATGA | 6750 |
| Arg29Term | AGAATTTGGGAGATCAGCGAGAAGGCGTTTGACGAGGTGAGAAA | |
| AGA-TGA | GACGGCAATCGACGACACTGAAATGGTGTGGA | |
| | CTTCTCGCTGATCTCCC | 6751 |
| | GGGAGATCAGCGAGAAG | 6752 |
| Increased stearate | TTTCAGTGTCGTCGATTGCCGTCTTTCTCACCTCGTCAAACGCCTT | 6753 |
| stearoyl-ACP | CTCGCAGATCTCCCTAATTCTTCATGGCTTCCACTCTCAGCAGCTC | |
| desaturase | TTCTCCTAAGGAAGCGGAAAGCCTGAAGA | |
| Spinacia oleracea | TCTTCAGGCTTTCCGCTTCCTTAGGAGAAGAGCTGCTGAGAGTGG | 6754 |
| Lys32Term | AAGCCATGAAGAATTAGGGAGATCTGCGAGAAGGCGTTTGACGAG | |
| AAA-TAA | GTGAGAAAGACGGCAATCGACGACACTGAAA | |
| | GATCTCCCTAATTCTTC | 6755 |
| | GAAGAATTAGGGAGATC | 6756 |
| Increased stearate | AAATAGTCGAGGTGAAAAACAGAGCATCAACAATGGCACTGAATAT | 6757 |
| stearoyl-ACP | CAATGGGGTGTCGTGAAAATCTCACAAAATGTTACCATTTCCTTGT | |
| desaturase | TCTTCAGCCAGATCTGAGCGAGTTTTCAT | |
| Solanum tuberosum | ATGAAAACTCGCTCAGATCTGGCTGAAGAACAAGGAAATGGTAAC | 6758 |
| Leu10Term | ATTTTGTGAGATTTTCACGACACCCCATTGATATTCAGTGCCATTGT | |
| TTA-TGA | TGATGCTCTGTTTTTCACCTCGACTATTT | |
| | GGTGTCGTGAAAATCTC | 6759 |
| | GAGATTTTCACGACACC | 6760 |
| Increased stearate | ATAGTCGAGGTGAAAAACAGAGCATCAACAATGGCACTGAATATCA | 6761 |
| stearoyl-ACP | ATGGGGTGTCGTTATAATCTCACAAAATGTTACCATTTCCTTGTTCT | |
| desaturase | TCAGCCAGATCTGAGCGAGTTTTCATGG | |
| Solanum tuberosum | CCATGAAAACTCGCTCAGATCTGGCTGAAGAACAAGGAAATGGTA | 6762 |
| Lys11Term | ACATTTTGTGAGATTATAACGACACCCCATTGATATTCAGTGCCATT | |
| AAA-TAA | GTTGATGCTCTGTTTTTCACCTCGACTAT | |
| | TGTCGTTATAATCTCAC | 6763 |
| | GTGAGATTATAACGACA | 6764 |
| Increased stearate | GTGAAAAACAGAGCATCAACAATGGCACTGAATATCAATGGGGTG | 6765 |
| stearoyl-ACP | TCGTTAAAATCTCACTAAATGTTACCATTTCCTTGTTCTTCAGCCAG | |
| desaturase | ATCTGAGCGAGTTTTCATGGCTTCAACCA | |
| Solanum tuberosum | TGGTTGAAGCCATGAAAACTCGCTCAGATCTGGCTGAAGAACAAG | 6766 |
| Lys14Term | GAAATGGTAACATTTAGTGAGATTTTAACGACACCCCATTGATATT | |
| AAA-TAA | CAGTGCCATTGTTGATGCTCTGTTTTTCAC | |
| | AATCTCACTAAATGTTA | 6767 |
| | TAACATTTAGTGAGATT | 6768 |
| Increased stearate | ACAGAGCATCAACAATGGCACTGAATATCAATGGGGTGTCGTTAAA | 6769 |
| stearoyl-ACP | ATCTCACAAAATGTGACCATTTCCTTGTTCTTCAGCCAGATCTGAG | |
| desaturase | CGAGTTTTCATGGCTTCAACCATTCATCG | |
| Solanum tuberosum | CGATGAATGGTTGAAGCCATGAAAACTCGCTCAGATCTGGCTGAA | 6770 |
| Leu16Term | GAACAAGGAAATGGTCACATTTTGTGAGATTTTAACGACACCCCAT | |
| TTA-TGA | TGATATTCAGTGCCATTGTTGATGCTCTGT | |
| | CAAAATGTGACCATTTC | 6771 |
| | GAAATGGTCACATTTTG | 6772 |
| Increased stearate | TGGCTCTGAGGCTGAACCCTAACCCTTCACAGAAGCTCTTTCTCTC | 6773 |
| stearoyl-ACP | TCCTTCTTCATCATGATCTTCTTCTTCTTCATCGTTCTCGCTTCCTC | |
| desaturase | AAATGGCTAGCCTCAGATCTCCAAGGTT | |
| Arachis hypogaea | AACCTTGGAGATCTGAGGCTAGCCATTTGAGGAAGCGAGAACGAT | 6774 |
| Ser21Term | GAAGAAGAAGAAGATCATGATGAAGAAGGAGAGAGAAAGAGCTTC | |
| TCA-TGA | TGTGAAGGGTTAGGGTTCAGCCTCAGAGCCA | |
| | TTCATCATGATCTTCTT | 6775 |
| | AAGAAGATCATGATGAA | 6776 |
| Increased stearate | ACCCTAACCCTTCACAGAAGCTCTTTCTCTCTCCTTCTTCATCATCA | 6777 |
| stearoyl-ACP | TCTTCTTCTTCTTGATCGTTCTCGCTTCCTCAAATGGCTAGCCTCA | |
| desaturase | GATCTCCAAGGTTCCGCATGGCCTCCAC | |
| Arachis hypogaea | GTGGAGGCCATGCGGAACCTTGGAGATCTGAGGCTAGCCATTTGA | 6778 |
| Ser26Term | GGAAGCGAGAACGATCAAGAAGAAGAAGATGATGATGAAGAAGGA | |
| TCA-TGA | GAGAGAAAGAGCTTCTGTGAAGGGTTAGGGT | |
| | TTCTTCTTGATCGTTCT | 6779 |
| | AGAACGATCAAGAAGAA | 6780 |
| Increased stearate | CTAACCCTTCACAGAAGCTCTTTCTCTCTCCTTCTTCATCATCATCT | 6781 |
| stearoyl-ACP | TCTTCTTCTTCATAGTTCTCGCTTCCTCAAATGGCTAGCCTCAGAT | |
| desaturase | CTCCAAGGTTCCGCATGGCCTCCACCCT | |
| Arachis hypogaea | AGGGTGGAGGCCATGCGGAACCTTGGAGATCTGAGGCTAGCCAT | 6782 |
| Ser27Term | TTGAGGAAGCGAGAACTATGAAGAAGAAGAAGATGATGATGAAGA | |
| TCG-TAG | AGGAGAGAGAAAGAGCTTCTGTGAAGGGTTAG | |
| | TTCTTCATAGTTCTCGC | 6783 |
| | GCGAGAACTATGAAGAA | 6784 |
| Increased stearate | CTTCACAGAAGCTCTTTCTCTCTCCTTCTTCATCATCATCTTCTTCT | 6785 |
| stearoyl-ACP | TCTTCATCGTTCTAGCTTCCTCAAATGGCTAGCCTCAGATCTCCAA | |
| desaturase | GGTTCCGCATGGCCTCCACCCTCCGCAC | |
| Arachis hypogaea | GTGCGGAGGGTGGAGGCCATGCGGAACCTTGGAGATCTGAGGCT | 6786 |
| Ser29Term | AGCCATTTGAGGAAGCTAGAACGATGAAGAAGAAGAAGATGATGA | |
| TCG-TAG | TGAAGAAGGAGAGAGAAAGAGCTTCTGTGAAG | |
| | ATCGTTCTAGCTTCCTC | 6787 |
| | GAGGAAGCTAGAACGAT | 6788 |
| Increased stearate | AAAGTTAAAAGCCGTCCAAAACCCAAACCAGGAAAGGCAAACGAA | |
| stearoyl-ACP | AAGAAAAAATGGCTTAGAATTTTAATGCCATCGCCTCGAAATCTCA | |
| desaturase | GAAGCTCCCTTGCTTTGCTCTTCCACCAAA | |
| Gossypium hirsutum | TTTGGTGGAAGAGCAAAGCAAGGGAGCTTCTGAGATTTCGAGGCG | 6790 |
| Leu3Term | ATGGCATTAAAATTCTAAGCCATTTTTTCTTTTCGTTTGCCTTTCCT | |
| TTG-TAG | GGTTTGGGTTTTGGACGGCTTTTAACTTT | |
| | AATGGCTTAGAATTTTA | 6791 |
| | TAAAATTCTAAGCCATT | 6792 |
| Increased stearate | CCCAAACCAGGAAAGGCAAACGAAAAGAAAAAATGGCTTTGAATTT | 6793 |
| stearoyl-ACP | TAATGCCATCGCCTAGAAATCTCAGAAGCTCCCTTGCTTTGCTCTT | |
| desaturase | CCACCAAAGGCCACCCTTAGATCTCCCAA | |
| Gossypium hirsutum | TTGGGAGATCTAAGGGTGGCCTTTGGTGGAAGAGCAAAGCAAGG | 6794 |
| Ser1Term | GAGCTTCTGAGATTTCTAGGCGATGGCATTAAAATTCAAAGCCATT | |
| TCG-TAG | TTTTCTTTTCGTTTGCCTTTCCTGGTTTGGG | |
| | CATCGCCTAGAAATCTC | 6795 |
| | GAGATTTCTAGGCGATG | 6796 |
| Increased stearate | CAAACCAGGAAAGGCAAACGAAAAGAAAAAATGGCTTTGAATTTTA | 6797 |
| stearoyl-ACP | ATGCGATCGCCTCGTAATCTCAGAAGCTCCCTTGCTTTGCTCTTCC | |
| desaturase | ACCAAAGGCCACCCTTAGATCTCCCAAGT | |
| Gossypium hirsutum | ACTTGGGAGATCTAAGGGTGGCCTTTGGTGGAAGAGCAAAGCAAG | 6798 |
| Lys11Term | GGAGCTTCTGAGATTACGAGGCGATGGCATTAAAATTCAAAGCCA | |
| AAA-TAA | TTTTTTCTTTTCGTTTGCCTTTCCTGGTTTG | |
| | TCGCCTCGTAATCTCAG | 6799 |
| | CTGAGATTACGAGGCGA | 6800 |
| Increased stearate | AGGAAAGGCAAACGAAAAGAAAAAATGGCTTTGAATTTTAATGCCA | 6801 |
| stearoyl-ACP | TCGCCTCGAAATCTTAGAAGCTCCCTTGCTTTGCTCTTCCACCAAA | |
| desaturase | GGCCACCCTTAGATCTCCCAAGTTTTCCA | |
| Gossypium hirsutum | TGGAAAACTTGGGAGATCTAAGGGTGGCCTTTGGTGGAAGAGCAA | 6802 |
| Gln13Term | AGCAAGGGAGCTTCTAAGATTTCGAGGCGATGGCATTAAAATTCA | |
| CAG-TAG | AAGCCATTTTTTCTTTTCGTTTGCCTTTCCT | |
| | CGAAATCTTAGAAGCTC | 6803 |
| | GAGCTTCTAAGATTTCG | 6804 |

[0277] TABLE 42
Oligonucleotides to produce plants with reduced linolenic acid

| Phenotype, Gene, | | |
|---|---|---|
| Plant & Targeted | | SEQ ID |
| Alteration | Altering Oligos | NO: |
| Reduced linolenic acid | AATAGAACGACAGAGACTTTTTCCTCTTTTCTTCTTGGGAAGAGGC | 6805 |
| omega-3 fatty acid | TCCAATGGCGAGCTAGGTTTTATCAGAATGTGGTTTTAGACCTCTC | |
| desaturase | CCCAGATTCTACCCTAAACACACAACCTC | |
| Arabidopsis thaliana | GAGGTTGTGTGTTTAGGGTAGAATCTGGGGAGAGGTCTATAAACCA | 6806 |
| Ser4Term | CATTCTGATAAAACCTAGCTCGCCATTGGAGCCTCTTCCCAAGAAG | |
| TCG-TAG | AAAAGAGGAAAAAGTCTCTGTCGTTCTATT | |
| | GGCGAGCTTGGTTTTAT | 6807 |
| | ATAAAACCAAGCTCGCC | 6808 |
| Reduced linolenic acid | ACGACAGAGACTTTTTCCTCTTTTCTTCTTGGGAAGAGGCTCCAAT | 6809 |
| omega-3 fatty acid | GGCGAGCTCGGTTTGATCAGAATGTGGTTTTAGACCTCTCCCCAG | |
| desaturase | ATTCTACCCTAAACACACAACCTCTTTTGC | |
| Arabidopsis thaliana | GCAAAAGAGGTTGTGTGTTTAGGGTAGAATCTGGGGAGAGGTCTA | 6810 |
| Leu6Term | AAACCACATTCTGATCAAACCGAGCTCGCCATTGGAGCCTCTTCCC | |
| TTA-TGA | AAGAAGAAAAGAGGAAAAAGTCTCTGTCGT | |
| | CTCGGTTTGATCAGAAT | 6811 |
| | ATTCTGATCAAACCGAG | 6812 |
| Reduced linolenic acid | ACAGAGACTTTTTCCTCTTTTCTTCTTGGGAAGAGGCTCCAATGGC | 6813 |
| omega-3 fatty acid | GAGCTCGGTTTTATGAGAATGTGGTTTTAGACCTCTCCCCAGATTC | |
| desaturase | TACCCTAAACACACAACCTCTTTTGCCTC | |
| Arabidopsis thaliana | GAGGCAAAAGAGGTTGTGTGTTTAGGGTAGAATCTGGGGAGAGGT | 6814 |
| Ser7Term | CTAAAACCACATTCTCATAAAACCGAGCTCGCCATTGGAGCCTCTT | |
| TCA-TGA | CCCAAGAAGAAAAGAGGAAAAAGTCTCTGT | |
| | GGTTTTATGAGAATGTG | 6815 |
| | CACATTCTCATAAAACC | 6816 |
| Reduced linolenic acid | AGAGACTTTTTCCTCTTTTCTTCTTGGGAAGAGGCTCCAATGGCGA | 6817 |
| omega-3 fatty acid | GCTCGGTTTTATCATAATGTGGTTTTAGACCTCTCCCCAGATTCTA | |
| desaturase | CCCTAAACACACAACCTCTTTTGCCTCTA | |
| Arabidopsis thaliana | TAGAGGCAAAAGAGGTTGTGTGTTTAGGGTAGAATCTGGGGAGAG | 6818 |
| Glu8Term | GTCTAAAACCACATTATGATAAAACCGAGCTCGCCATTGGAGCCTC | |
| GAA-TAA | TTCCCAAGAAGAAAAGAGGAAAAAGTCTCT | |
| | TTTTATCATAATGTGGT | 6819 |
| | ACCACATTATGATAAAA | 6820 |
| Reduced linolenic acid | CATCATCTTCTTCTTCTGGGGAGAGAGAGAGAGCAAAAGAGCTC | 6821 |
| omega-3 fatty acid | TAGCAATGGCGAACTAGGTCTTATCCGAATGTGGCATAAGACCTC | |
| desaturase | TCCCCAGAATCTACACCACACCCAGATCCAC | |
| Brassica juncea | GTGGATCTGGGTGTGGTGTAGATTCTGGGGAGAGGTCTTATGCCA | 6822 |
| Leu4Term | CATTCGGATAAGACCTAGTTCGCCATTGCTAGAGCTCTTTTGCTCT | |
| TTG-TAG | CTCTCTCTCCCCAGAAGAAGAAGATGATGA | |
| | GGCGAACTAGGTCTTAT | 6823 |
| | ATAAGACCTAGTTCGCC | 6824 |
| Reduced linolenic acid | TCTTCTTCTTCTGGGGAGAGAGAGAGAGCAAAAGAGCTCTAGCAA | 6825 |
| omega-3 fatty acid | TGGCGAACTTGGTCTGATCCGAATGTGGCATAAGACCTCTCCCGA | |
| desaturase | GAATCTACACCACACCCAGATCCACTTTCCT | |
| Brassica juncea | AGGAAAGTGGATCTGGGTGTGGTGTAGATTCTGGGGAGAGGTCTT | 6826 |
| Leu6Term | ATGCCACATTCGGATCAGACCAAGTTCGCCATTGCTAGAGCTCTTT | |
| TTA-TGA | TGCTCTCTCTCTCTCCCCAGAAGAAGAAGA | |
| | CTTGGTCTGATCCGAAT | 6827 |
| | ATTCGGATCAGACCAAG | 6828 |
| Reduced malelic acid | TTCTTCTGGGGAGAGAGAGAGAGCAAAAGAGCTCTAGCAATGGCG | 6829 |
| omega-3 fatty acid | AACTTGGTCTTATCCTAATGTGGCATAAGACCTCTCCCCAGAATCT | |
| desaturase | ACACCACACCCAGATCCACTTTCCTCTCCA | |
| Brassica juncea | TGGAGAGGAAAGTGGATCTGGGTGTGGTGTAGATTCTGGGGAGA | 6830 |
| Glu8Term | GGTCTTATGCCACATTAGGATAAGACCAAGTTCGCCATTGCTAGA | |
| GAA-TAA | GCTCTTTTGCTCTCTCTCTCTCCCCAGAAGAA | |
| | TCTTATCCTAATGTGGC | 6831 |
| | GCCACATTAGGATAAGA | 6832 |
| Reduced linolenic acid | CTGGGGAGAGAGAGAGAGCAAAAGAGCTCTAGCAATGGCGAACT | 6833 |
| omega-3 fatty acid | TGGTCTTATCCGAATGAGGCATAAGACCTCTCCCCAGAATCTACAC | |
| desaturase | CACACCCAGATCCACTTTCCTCTCCAACACC | |
| Brassica juncea | GGTGTTGGAGAGGAAAGTGGATCTGGGTGTGGTGTAGATTCTGG | 6834 |
| Cys9Term | GGAGAGGTCTTATGCCTCATTCGGATAAGACCAAGTTCGCCATTG | |
| TGT-TGA | CTAGAGCTCTTTTGCTCTCTCTCTCTCCCCAG | |
| | TCCGAATGAGGCATAAG | 6835 |
| | CTTATGCCTCATTCGGA | 6836 |
| Reduced linolenic acid | ATAACAGAATTGCTGAATTCTTGCATTTTTAGCTTCTGGGTTTTCAA | 6837 |
| omega-3 fatty acid | TGGCTGCTGGTTGAGTATTATCAGAATGTGGTTTAAGGCCTCTCCC | |
| desaturase | AAGAATCTACTCACGACCCAGAATTGGT | |
| Ricinus communis | ACCAATTCTGGGTCGTGAGTAGATTCTTGGGAGAGGCCTTAAACC | 6838 |
| Trp5Term | ACATTCTGATAATACTCAACCAGCAGCCATTGAAAACCCAGAAGCT | |
| TGG-TGA | AAAAATGCAAGAATTCAGCAATTCTGTTAT | |
| | GCTGGTTGAGTATTATC | 6839 |
| | GATAATACTCAACCAGC | 6840 |
| Reduced linolenic acid | AGAATTGCTGAATTCTTGCATTTTTAGCTTCTGGGTTTTCAATGGCT | 6841 |
| omega-3 fatty acid | GCTGGTTGGGTATGATCAGAATGTGGTTTAAGGCCTCTCCCAAGA | |
| desaturase | ATCTACTCACGACCCAGAATTGGTTTTAC | |
| Ricinus communis | GTAAAACCAATTCTGGGTCGTGAGTAGATTCTTGGGAGAGGCCTT | 6842 |
| Leu7Term | AAACCACATTCTGATCATACCCAACCAGCAGCCATTGAAAACCCAG | |
| TTA-TGA | AAGCTAAAAATGCAAGAATTCAGCAATTCT | |
| | TTGGGTATGATCAGAAT | 6843 |
| | ATTCTGATCATACCCAA | 6844 |
| Reduced linolenic acid | ATTGCTGAATTCTTGCATTTTTAGCTTCTGGGTTTTCAATGGCTGCT | 6845 |
| omega-3 fatty acid | GGTTGGGTATTATGAGAATGTGGTTTAAGGCCTCTCCCAAGAATCT | |
| desaturase | ACTCACGACCCAGAATTGGTTTTACATC | |
| Ricinus communis | GATGTAAAACCAATTCTGGGTCGTGAGTAGATTCTTGGGAGAGGC | 6846 |
| Ser8Term | CTTAAACCACATTCTCATAATACCCAACCAGCAGCCATTGAAAACC | |
| TCA-TGA | CAGAAGCTAAAAATGCAAGAATTCAGCAAT | |
| | GGTATTATGAGAATGTG | 6847 |
| | CACATTCTCATAATACC | 6848 |
| Reduced linolenic acid | TGCTGAATTCTTGCATTTTTAGCTTCTGGGTTTTCAATGGCTGCTG | 6849 |
| omega-3 fatty acid | GTTGGGTATTATCATAATGTGGTTTAAGGCCTCTCCCAAGAATCTA | |
| desaturase | CTCACGACCCAGAATTGGTTTTACATCGA | |
| Ricinus communis | TCGATGTAAAACCAATTCTGGGTCGTGAGTAGATTCTTGGGAGAG | 6850 |
| Glu9Term | GCCTTAAACCACATTATGATAATACCCAACCAGCAGCCATTGAAAA | |
| GAA-TAA | CCCAGAAGCTAAAAATGCAAGAATTCAGCA | |
| | TATTATCATAATGTGGT | 6851 |
| | ACCACATTATGATAATA | 6852 |
| Reduced linolenic acid | GCAAGTTGGGTTTTATCAGAATGTGGTCTTAGACCACTCCCAAGAA | 6853 |
| omega-3 fatty acid | TCTACGCTAAGCCCTGAACTGGGGCAGCCACTTCTGCCTCCTCTC | |
| desaturase | ACATTAAGTTGAGAATTTCACGTACAGATC | |
| Nicotiana tabacum | GATCTGTACGTGAAATTCTCAACTTAATGTGAGAGGAGGCAGAAGT | 6854 |
| Arg22Term | GGCTGCCCCAGTTCAGGGCTTAGGGTAGATTCTTGGGAGTGGTCT | |
| AGA-TGA | AAGACCACATTCTGATAAAACCCAACTTGC | |
| | CTAAGCCCTGAACTGGG | 6855 |
| | CCCAGTTCAGGGCTTAG | 6856 |
| Reduced linolenic acid | CTCCCAAGAATCTACCCTAAGCCCAGAACTGGGGCAGCCACTTCT | 6857 |
| omega-3 fatty acid | GCCTCCTCTCACATTTAGTTGAGAATTTCACGTACAGATCTGAGTG | |
| desaturase | GTTCTGCAATTTCTTTGTCTAATACTAATA | |
| Nicotiana tabacum | TATTAGTATTAGACAAAGAAATTGCAGAACCACTCAGATCTGTACG | 6858 |
| Lys34Term | TGAAATTCTCAACTAAATGTGAGAGGAGGCAGAAGTGGCTGCCCC | |
| AAG-TAG | AGTTCTGGGCTTAGGGTAGATTCTTGGGAG | |
| | CTCACATTTAGTTGAGA | 6859 |
| | TCTCAACTAAATGTGAG | 6860 |
| Reduced malefic acid | CAAGAATCTACCCTAAGCCCAGAACTGGGGCAGCCACTTCTGCCT | 6861 |
| omega-3 fatty acid | CCTCTCACATTAAGTAGAGAATTTCACGTACAGATCTGAGTGGTTC | |
| desaturase | TGCAATTTCTTTGTCTAATACTAATAAAGA | |
| Nicotiana tabacum | TCTTTATTAGTATTAGACAAAGAAATTGCAGAACCACTCAGATCTGT | 6862 |
| Leu35Term | ACGTGAAATTCTCTACTTAATGTGAGAGGAGGCAGAAGTGGCTGC | |
| TTG-TAG | CCCAGTTCTGGGCTTAGGGTAGATTCTTG | |
| | CATTAAGTAGAGAATTT | 6863 |
| | AAATTCTCTACTTAATG | 6864 |
| Reduced linolenic acid | AGAATCTACCCTAAGCCCAGAACTGGGGCAGCCACTTCTGCCTCC | 6865 |
| omega-3 fatty acid | TCTCACATTAAGTTGTGAATTTCACGTACAGATCTGAGTGGTTCTG | |
| desaturase | CAATTTCTTTGTCTAATACTAATAAAGAGA | |
| Nicotiana tabacum | TCTCTTTATTAGTATTAGACAAAGAAATTGCAGAACCACTCAGATCT | 6866 |
| Arg36Term | GTACGTGAAATTCACAACTTAATGTGAGAGGAGGCAGAAGTGGCT | |
| AGA-TGA | GCCCCAGTTCTGGGCTTAGGGTAGATTCT | |
| | TTAAGTTGTGAATTTCA | 6867 |
| | TGAAATTCACAACTTAA | 6868 |
| Reduced linolenic acid | GCGAGTTGGGTTTTATCAGAATGTGGTCTGAGGCCACTCCCGAGG | 6869 |
| omega-3 fatty acid | GTCTATCCTAAGCCATGAACTGGCCACCCTTTGTTGAATTCCAATC | |
| desaturase | CCACAAAGCTGAGATTTTCAAGAACAGATC | |
| Sesamum indicum | GATCTGTTCTTGAAAATCTCAGCTTTGTGGGATTGGAATTCAACAA | 6870 |
| Arg22Term | AGGGTGGCCAGTTCATGGCTTAGGATAGACCCTCGGGAGTGGCC | |
| AGA-TGA | TCAGACCACATTCTGATAAAACCCAACTCGC | |
| | CTAAGCCATGAACTGGC | 6871 |
| | GCCAGTTCATGGCTTAG | 6872 |
| Reduced linolenic acid | CAGAATGTGGTCTGAGGCCACTCCCGAGGGTCTATCCTAAGCCAA | 6873 |
| omega-3 fatty acid | GAACTGGCCACCCTTAGTTGAATTCCAATCCCACAAAGCTGAGATT | |
| desaturase | TTCAAGAACAGATCTTGGAAATGGTTCTTC | |
| Sesamum indicum | GAAGAACCATTTCCAAGATCTGTTCTTGAAAATCTCAGCTTTGTGG | 6874 |
| Leu21Term | GATTGGAATTCAACTAAGGGTGGCCAGTTCTTGGCTTAGGATAGA | |
| TTG-TAG | CCCTCGGGAGTGGCCTCAGACCACATTCTG | |
| | CCACCCTTAGTTGAATT | 6875 |
| | AATTCAACTAAGGGTGG | 6876 |
| Reduced linolenic acid | AATGTGGTCTGAGGCCACTCCCGAGGGTCTATCCTAAGCCAAGAA | 6877 |
| omega-3 fatty acid | CTGGCCACCCTTTGTAGAATTCCAATCCCACAAAGCTGAGATTTTC | |
| desaturase | AAGAACAGATCTTGGAAATGGTTCTTCATT | |
| Sesamum indicum | AATGAAGAACCATTTCCAAGATCTGTTCTTGAAAATCTCAGCTTTGT | 6878 |
| Leu28Term | GGGATTGGAATTCTACAAAGGGTGGCCAGTTCTTGGCTTAGGATA | |
| TTG-TAG | GACCCTCGGGAGTGGCCTCAGACCACATT | |
| | CCCTTTGTAGAATTCCA | 6879 |
| | TGGAATTCTACAAAGGG | 6880 |
| Reduced linolenic acid | CTCCCGAGGGTCTATCCTAAGCCAAGAACTGGCCACCCTTTGTTG | 6881 |
| omega-3 fatty acid | AATTCCAATCCCACATAGCTGAGATTTTCAAGAACAGATCTTGGAA | |
| desaturase | ATGGTTCTTCATTCTGTTTGTCGAGTGGGA | |
| Sesamum indicum | TCCCACTCGACAAACAGAATGAAGAACCATTTCCAAGATCTGTTCT | 6882 |
| Lys34Term | TGAAAATCTCAGCTATGTGGGATTGGAATTCAACAAAGGGTGGCC | |
| AAG-TAG | AGTTCTTGGCTTAGGATAGACCCTCGGGAG | |
| | ATCCCACATAGCTGAGA | 6883 |
| | TCTCAGCTATGTGGGAT | 6884 |
| Reduced linolenic acid | CATCAGAGCGGGGATACCTAAGCATTGCTGGGTTAAGAATCCATG | 6885 |
| omega-3 fatty acid | GAAGTCTATGAGTTAGGTCGTCAGAGAGCTAGCCATCGTGTTCGC | |
| desaturase | ACTAGCTGCTGGAGCTGCTTACCTCAACAAT | |
| Brassica napus | ATTGTTGAGGTAAGCAGCTCCAGCAGCTAGTGCGAACACGATGGC | 6886 |
| Tyr3Term | TAGCTCTCTGACGACCTAACTCATAGACTTCCATGGATTCTTAACC | |
| TAC-TAG | CAGCAATGCTTAGGTATCGCCGCTCTGATG | |
| | ATGAGTTAGGTCGTCAG | 6887 |
| | CTGACGACCTAACTCAT | 6888 |
| Reduced linolenic acid | GCGGCGATACCTAAGCATTGCTGGGTTAAGAATCCATGGAAGTCT | 6889 |
| omega-3 fatty acid | ATGAGTTACGTCGTCTGAGAGCTAGCCATCGTGTTCGCACTAGCT | |
| desaturase | GCTGGAGCTGCTTACCTCAACAATTGGCTTG | |
| Brassica napus | CAAGCCAATTGTTGAGGTAAGCAGCTCCAGCAGCTAGTGCGAACA | 6890 |
| Arg6Term | CGATGGCTAGCTCTCAGACGACGTAACTCATAGACTTCCATGGATT | |
| AGA-TGA | CTTAACCCAGCAATGCTTAGGTATCGCCGC | |
| | ACGTCGTCTGAGAGCTA | 6891 |
| | TAGCTCTCAGACGACGT | 6892 |
| Reduced linolenic acid | GCGATACCTAAGCATTGCTGGGTTAAGAATCCATGGAAGTCTATGA | 6893 |
| omega-3 fatty acid | GTTACGTCGTCAGATAGCTAGCCATCGTGTTCGCACTAGCTGCTG | |
| desaturase | GAGCTGCTTACCTCAACAATTGGCTTGTTT | |
| Brassica napus | AAACAAGCCAATTGTTGAGGTAAGCAGCTCCAGCAGCTAGTGCGA | 6894 |
| Glu7Term | ACACGATGGCTAGCTATCTGACGACGTAACTCATAGACTTCCATG | |
| GAG-TAG | GATTCTTAACCCAGCAATGCTTAGGTATCGC | |
| | TCGTCAGATAGCTAGCC | 6895 |
| | GGCTAGCTATCTGACGA | 6896 |
| Reduced linolenic acid | CCATGGAAGTCTATGAGTTACGTCGTCAGAGAGCTAGCCATCGTG | 6897 |
| omega-3 fatty acid | TTCGCACTAGCTGCTTGAGCTGCTTACCTCAACAATTGGCTTGTTT | |
| desaturase | GGCCTCTCTATTGGATTGCTCAAGGAACCA | |
| Brassica napus | TGGTTCCTTGAGCAATCCAATAGAGAGGCCAAACAAGCCAATTGTT | 6898 |
| Gly17Term | GAGGTAAGCAGCTCAAGCAGCTAGTGCGAACACGATGGCTAGCT | |
| GGA-TGA | CTCTGACGACGTAACTCATAGACTTCCATGG | |
| | TAGCTGCTTGAGCTGCT | 6899 |
| | AGCAGCTCAAGCAGCTA | 6900 |
| Reduced linolenic acid | GCAAGTTGGGTTCTATCAGAATGTGGTCTTAGACCACTACCAAGAA | 6901 |
| omega-3 fatty acid | TATACCCAAAGCCCTGAATAGGGTCTTCTTCCGTTTGCGCCACCAA | |
| desaturase | TTTAAATCTGAGAAGAATTTCACCTTCAC | |
| Solanum tuberosum | GTGAAGGTGAAATTCTTCTCAGATTTAAATTGGTGGCGCAAACGGA | 6902 |
| Arg22Term | AGAAGACCCTATTCAGGGCTTTGGGTATATTCTTGGTAGTGGTCTA | |
| AGA-TGA | AGACCACATTCTGATAGAACCCAACTTGC | |
| | CAAAGCCCTGAATAGGG | 6903 |
| | CCCTATTCAGGGCTTTG | 6904 |
| Reduced linolenic acid | TGGTCTTAGACCACTACCAAGAATATACCCAAAGCCCAGAATAGG | 6905 |
| omega-3 fatty acid | GTCTTCTTCCGTTTGAGCCACCAATTTAAATCTGAGAAGAATTTCA | |
| desaturase | CCTTCACCTATACGAACAGATCGGAATTGT | |
| Solanum tuberosum | ACAATTCCGATCTGTTCGTATAGGTGAAGGTGAAATTCTTCTCAGA | 6906 |
| Cys29Term | TTTAAATTGGTGGCTCAAACGGAAGAAGACCCTATTCTGGGCTTTG | |
| TGC-TGA | GGTATATTCTTGGTAGTGGTCTAAGACCA | |
| | TCCGTTTGAGCCACCAA | 6907 |
| | TTGGTGGCTCAAACGGA | 6908 |
| Reduced linolenic acid | CACTACCAAGAATATACCCAAAGCCCAGAATAGGGTCTTCTTCCGT | 6909 |
| omega-3 fatty acid | TTGCGCCACCAATTGAAATCTGAGAAGAATTTCACCTTCACCTATA | |
| desaturase | CGAACAGATCGGAATTGTTGGGCATTGAG | |
| Solanum tuberosum | CTCAATGCCCAACAATTCCGATCTGTTCGTATAGGTGAAGGTGAAA | 6910 |
| Leu33Term | TTCTTCTCAGATTTCAATTGGTGGCGCAAACGGAAGAAGACCCTAT | |
| TTA-TGA | TCTGGGCTTTGGGTATATTCTTGGTAGTG | |
| | CACCAATTGAAATCTGA | 6911 |
| | TCAGATTTCAATTGGTG | 6912 |
| Reduced linolenic acid | AGAATATACCCAAAGCCCAGAATAGGGTCTTCTTCCGTTTGCGCCA | 6913 |
| omega-3 fatty acid | CCAATTTAAATCTGTGAAGAATTTCACCTTCACCTATACGAACAGAT | |
| desaturase | CGGAATTGTTGGGCATTGAGGGTAAGTG | |
| Solanum tuberosum | CACTTACCCTCAATGCCCAACAATTCCGATCTGTTCGTATAGGTGA | 6914 |
| Arg36Term | AGGTGAAATTCTTCACAGATTTAAATTGGTGGCGCAAACGGAAGAA | |
| AGA-TGA | GACCCTATTCTGGGCTTTGGGTATATTCT | |
| | TAAATCTGTGAAGAATT | 6915 |
| | AATTCTTCACAGATTTA | 6916 |
| Reduced linolenic acid | CTCTTTATTATCCTCCTCTTCTTTGTTTTTTTTGAGTTCTGAGTCACC | 6917 |
| omega-3 fatty acid | TATGGCAAGTTGAGTGATTTCAGAATGTGGGCTAAGGCCACTTCC | |
| desaturase | AAGAATCTATGCCAGGCCCAGAAGTGGA | |
| Petroselinum crispum | TCCACTTCTGGGCCTGGCATAGATTCTTGGAAGTGGCCTTAGCCC | 6918 |
| Trp4Term | ACATTCTGAAATCACTCAACTTGCCATAGGTGACTCAGAACTCATAA | |
| TGG-TGA | AAAAACAAAGAAGAGGAGGATAATAAAGAG | |
| | GCAAGTTGAGTGATTTC | 6919 |
| | GAAATCACTCAACTTGC | 6920 |
| Reduced linolenic acid | TATCCTCCTCTTCTTTGTTTTTTTTGAGTTCTGAGTCACCTATGGCA | 6921 |
| omega-3 fatty acid | AGTTGGGTGATTTGAGAATGTGGGCTAAGGCCACTTCCAAGT4ATC | |
| desaturase | TATGCCAGGCCCAGAAGTGGAGCTTCATG | |
| Petroselinum crispum | CATGAAGCTCCACTTCTGGGCCTGGCATAGATTCTTGGAAGTGGC | 6922 |
| Ser7Term | CTTAGCCCACATTCTCAAATCACCCAACTTGCCATAGGTGACTCAG | |
| TCA-TGA | AACTCAAAAAAAACAAAGAAGAGGAGGATA | |
| | GGTGATTTGAGAATGTG | 6923 |
| | CACATTCTCAAATCACC | 6924 |
| Reduced linolenic acid | TCCTCCTCTTCTTTGTTTTTTTTGAGTTCTGAGTCACCTATGGCAAG | 6925 |
| omega-3 fatty acid | TTGGGTGATTTCATAATGTGGGCTAAGGCCACTTCCAAGAATCTAT | |
| desaturase | GCCAGGCCCAGAAGTGGAGCTTCATGTT | |
| Petroselinum crispum | AACATGAAGCTCCACTTCTGGGCCTGGCATAGATTCTTGGAAGTG | 6926 |
| Glu8Term | GCCTTAGCCCACATTATGAAATCACCCAACTTGCCATAGGTGACTC | |
| GAA-TAA | AGAACTCAAAAAAAACAAAGAAGAGGAGGA | |
| | TGATTTCATAATGTGGG | 6927 |
| | CCCACATTATGAAATCA | 6928 |
| Reduced linolenic acid | CTCTTCTTTGTTTTTTTTGAGTTCTGAGTCACCTATGGCAAGTTGGG | 6929 |
| omega-3 fatty acid | TGATTTCAGAATGAGGGCTAAGGCCACTTCCAAGAATCTATGCCA | |
| desaturase | GGCCCAGAAGTGGAGCTTCATGTTTCAAC | |
| Petroselinum crispum | GTTGAAACATGAAGCTCCACTTCTGGGCCTGGCATAGATTCTTGG | 6930 |
| Cys9Term | AAGTGGCCTTAGCCCTCATTCTGAAATCACCCAACTTGCCATAGGT | |
| TGT-TGA | GACTCAGAACTCAAAAAAAACAAAGAAGAG | |
| | TCAGAATGAGGGCTAAG | 6931 |
| | CTTAGCCCTCATTCTGA | 6932 |
| Reduced linolenic acid | ATGAAGCAGCAACAGTACAAAGACACCCCAATTCTAAATGGCGTTA | 6933 |
| omega-3 fatty acid | ATGGTTTTCATGCTTAAGAAGAAGAAGAAGAAGAGGATTTCGACTT | |
| desaturase | AAGCAATCCTCCTCCATTCAATATTGGTC | |
| Vernicia fordii | GACCAATATTGAATGGAGGAGGATTGCTTAAGTCGAAATCCTCTTC | 6934 |
| Lys21Term | TTCTTCTTCTTCTTAAGCATGAAAACCATTAACGCCATTTAGAATTG | |
| AAA-TAA | GGGTGTCTTTGTACTGTTGCTGCTTCAT | |
| | TTCATGCTTAAGAAGAA | 6935 |
| | TTCTTCTTAAGCATGAA | 6936 |
| Reduced linolenic acid | AAGCAGCAACAGTACAAAGACACCCCAATTCTAAATGGCGTTAATG | 6937 |
| omega-3 fatty acid | GTTTTCATGCTAAATAAGAAGAAGAAGAAGAGGATTTCGACTTAAG | |
| desaturase | CAATCCTCCTCCATTCAATATTGGTCAGA | |
| Vernicia fordii | TCTGACCAATATTGAATGGAGGAGGATTGCTTAAGTCGAAATCCTC | 6938 |
| Glu22Term | TTCTTCTTCTTCTTATTTAGCATGAAAACCATTAACGCCATTTAGAA | |
| GAA-TAA | TTGGGGTGTCTTTGTACTGTTGCTGCTT | |
| | ATGCTAAATAAGAAGAA | 6939 |
| | TTCTTCTTATTTAGCAT | 6940 |
| Reduced linolenic acid | CAGCAACAGTACAAAGACACCCCAATTCTAAATGGCGTTAATGGTT | 6941 |
| omega-3 fatty acid | TTCATGCTAAAGAATAAGAAGAAGAAGAGGATTTCGACTTAAGCAA | |
| desaturase | TCCTCCTCCATTCAATATTGGTCAGATCC | |
| Vernicia fordii | GGATCTGACCAATATTGAATGGAGGAGGATTGCTTAAGTCGAAATC | 6942 |
| Glu23Term | CTCTTCTTCTTCTTATTCTTTAGCATGAAAACCATTAACGCCATTTA | |
| GAA-TAA | GAATTGGGGTGTCTTTGTACTGTTGCTG | |
| | CTAAAGAATAAGAAGAA | 6943 |
| | TTCTTCTTATTCTTTAG | 6944 |
| Reduced linolenic acid | CAGCAACAGTACAAAGACACCCCAATTCTAAATGGCGTTAATGGTT | 6945 |
| omega-3 fatty acid | TTCATGCTAAAGAATAAGAAGAAGAAGAGGATTTCGACTTAAGCAA | |
| desaturase | TCCTCCTCCATTCAATATTGGTCAGATCC | |
| Vernicia fordii | GGATCTGACCAATATTGAATGGAGGAGGATTGCTTAAGTCGAAATC | 6946 |
| Glu24Term | CTCTTCTTCTTCTTATTCTTTAGCATGAAAACCATTAACGCCATTTA | |
| GAA-TAA | GAATTGGGGTGTCTTTGTACTGTTGCTG | |
| | CTAAAGAATAAGAAGAA | 6947 |
| | TTCTTCTTATTCTTTAG | 6948 |
| Reduced linolenic acid | GGTCCAAGCACAGCCTCTACAACATGTTGGTAATGGTGCAGGGAA | 6949 |
| omega-3 fatty acid | AGAAGATCAAGCTTAGTTTGATCCAAGTGCTCCACCACCCTTCAAG | |
| desaturase | ATTGCAAATATCAGAGCAGCAATTCCAAAA | |
| Glycine max | TTTTGGAATTGCTGCTCTGATATTTGCAATCTTGAAGGGTGGTGGA | 6950 |
| Tyr21Term | GCACTTGGATCAAACTAAGCTTGATCTTCTTTCCCTGCACCATTAC | |
| TAT-TAG | CAACATGTTGTAGAGGCTGTGCTTGGACC | |
| | CAAGCTTAGTTTGATCC | 6951 |
| | GGATCAAACTAAGCTTG | 6952 |
| Reduced linolenic acid | GGTAATGGTGCAGGGAAAGAAGATCAAGCTTATTTTGATCCAAGT | 6953 |
| omega-3 fatty acid | GCTCCACCACCCTTCTAGATTGCAAATATCAGAGCAGCAATTCCAA | |
| desaturase | AACATTGCTGGGAGAAGAACACATTGAGAT | |
| Glycine max | ATCTCAATGTGTTCTTCTCCCAGCAATGTTTTGGAATTGCTGCTCT | 6954 |
| Lys31Term | GATATTTGCAATCTAGAAGGGTGGTGGAGCACTTGGATCAAAATAA | |
| AAG-TAG | GCTTGATCTTCTTTCCCTGCACCATTACC | |
| | CACCCTTCTAGATTGCA | 6955 |
| | TGCAATCTAGAAGGGTG | 6956 |
| Reduced linolenic acid | AAAGAAGATCAAGCTTATTTTGATCCAAGTGCTCCACCACCCTTCA | 6957 |
| omega-3 fatty acid | AGATTGCAAATATCTGAGCAGCAATTCCAAAACATTGCTGGGAGAA | |
| desaturase | GAACACATTGAGATCTCTGAGTTATGTTC | |
| Glycine max | GAACATAACTCAGAGATCTCAATGTGTTCTTCTCCCAGCAATGTTTT | 6958 |
| Arg36Term | GGAATTGCTGCTCAGATATTTGCAATCTTGAAGGGTGGTGGAGCA | |
| AGA-TGA | CTTGGATCAAAATAAGCTTGATCTTCTTT | |
| | CAAATATCTGAGCAGCA | 6959 |
| | TGCTGCTCAGATATTTG | 6960 |
| Reduced linolenic acid | TATTTTGATCCAAGTGCTCCACCACCCTTCAAGATTGCAAATATCA | 6961 |
| omega-3 fatty acid | GAGCAGCAATTCCATAACATTGCTGGGAGAAGAACACATTGAGAT | |
| desaturase | CTCTGAGTTATGTTCTGAGGGATGTGTTGG | |
| Glycine max | CCAACACATCCCTCAGAACATAACTCAGAGATCTCAATGTGTTCTT | 6962 |
| Leu41Term | CTCCCAGCAATGTTATGGAATTGCTGCTCTGATATTTGCAATCTTG | |
| AAA-TAA | AAGGGTGGTGGAGCACTTGGATCAAAATA | |
| | CAATTCCATAACATTGC | 6963 |
| | GCAATGTTATGGAATTG | 6964 |
| Reduced linolenic acid | CATCCACCCGCACCCGCACCCGCCCCGCTGACGGCGGCAATGGC | 6965 |
| omega-3 fatty acid | CCGGCTCGTGCTCTCCTAGTGCTCGGGCCTCGCGCCCGTCCGCC | |
| desaturase | GCCTGCGCGCCGGCCGGGGCGCCATTGCGGCGC | |
| Zea mays | GCGCCGCAATGGCGCCCCGGCCGGCGCGCAGGCGGCGGACGG | 6966 |
| Glu8Term | GCGCGAGGCCCGAGCACTAGGAGAGCACGAGCCGGGCCATTGC | |
| GAG-TAG | CGCCGTCAGCGGGGCGGGTGCGGGTGCGGGTGGATG | |
| | TGCTCTCCTAGTGCTCG | 6967 |
| | CGAGCACTAGGAGAGCA | 6968 |
| Reduced linolenic acid | ACCCGCACCCGCACCCGCCCCGCTGACGGCGGCAATGGCCCGG | 6969 |
| omega-3 fatty acid | CTCGTGCTCTCCGAGTGATCGGGCCTCGCGCCCGTCCGCCGCCT | |
| desaturase | GCGCGCCGGCCGGGGCGCCATTGCGGCGCGGTCA | |
| Zea mays | TGACCGCGCCGCAATGGCGCCCCGGCCGGCGCGCAGGCGGCGG | 6970 |
| Cys9Term | ACGGGCGCGAGGCCCGATCACTCGGAGAGCACGAGCCGGGCCA | |
| TGC-TGA | TTGCCGCCGTCAGCGGGGCGGGTGCGGGTGCGGGT | |
| | TCCGAGTGATCGGGCCT | 6971 |
| | AGGCCCGATCACTCGGA | 6972 |
| Reduced linolenic acid | CCGCACCCGCACCCGCCCCGCTGACGGCGGCAATGGCCCGGCT | 6973 |
| omega-3 fatty acid | CGTGCTCTCCGAGTGCTAGGGCCTCGCGCCCGTCCGCCGCCTGC | |
| desaturase | GCGCCGGCCGGGGCGCCATTGCGGCGCGGTCACC | |
| Zea mays | GGTGACCGCGCCGCAATGGCGCCCCGGCCGGCGCGCAGGCGGC | 6974 |
| Ser10Term | GGACGGGCGCGAGGCCCTAGCACTCGGAGAGCACGAGCCGGGC | |
| TCG-TAG | CATTGCCGCCGTCAGCGGGGCGGGTGCGGGTGCGG | |
| | CGAGTGCTAGGGCCTCG | 6975 |
| | CGAGGCCCTAGCACTCG | 6976 |
| Reduced linolenic acid | GCTCGGGCCTCGCGCCCGTCCGCCGCCTGCGCGCCGGCCGGGG | 6977 |
| omega-3 fatty acid | CGCCATTGCGGCGCGGTGACCCCCCGCGCTCTCCGCGGCGCCG | |
| desaturase | CGCCGTCGTCCCGCGTCCGCGTCCATCCACCGCGA | |
| Zea mays | TCGCGGTGGATGGACGCGGACGCGGGACGACGGCGCGGCGCCG | 6978 |
| Ser29Term | CGGAGAGCGCGGGGGGTCACCGCGCCGCAATGGCGCCCCGGCC | |
| TCA-TGA | GGCGCGCAGGCGGCGGACGGGCGCGAGGCCCGAGC | |
| | GGCGCGGTGACCCCCCG | 6979 |
| | CGGGGGGTCACCGCGCC | 6980 |
| Reduced linolenic acid | CCCCCTCCCCCACGCACACGCACAGATCCATCCGCGGCCATGGC | 6981 |
| omega-3 fatty acid | CCCCGCAATGAGGCCGTAGCAGGAGGCGAGCTGCAAGGCCACCG | |
| desaturase | AGGACCACCGCTCCGAGTTCGACGCCGCCAAGC | |
| Triticum aestivum | GCTTGGCGGCGTCGAACTCGGAGCGGTGGTCCTCGGTGGCCTTG | 6982 |
| Glu8Term | CAGCTCGCCTCCTGCTACGGCCTCATTGCGGGGGCCATGGCCGC | |
| GAG-TAG | GGATGGATCTGTGCGTGTGCGTGGGGGAGGGGG | |
| | TGAGGCCGTAGCAGGAG | 6983 |
| | CTCCTGCTACGGCCTCA | 6984 |
| Reduced linolenic acid | CCTCCCCCACGCACACGCACAGATCCATCCGCGGCCATGGCCCC | 6985 |
| omega-3 fatty acid | CGCAATGAGGCCGGAGTAGGAGGCGAGCTGCTAAGGCCACCGAG | |
| desaturase | GACCACCGCTCCGAGTTCGACGCCGCCAAGCCGC | |
| Triticum aestivum | GCGGCTTGGCGGCGTCGAACTCGGAGCGGTGGTCCTCGGTGGCC | 6986 |
| Gln9Term | TTGCAGCTCGCCTCCTACTCCGGCCTCATTGCGGGGGCCATGGC | |
| CAG-TAG | CGCGGATGGATCTGTGCGTGTGCGTGGGGGAGG | |
| | GGCCGGAGTAGGAGGCG | 6987 |
| | CGCCTCCTACTCCGGCC | 6988 |
| Reduced linolenic acid | CCCCCACGCACACGCACAGATCCATCCGCGGCCATGGCCCCCGC | 6989 |
| omega-3 fatty acid | AATGAGGCCGGAGCAGTAGGCGAGCTGCAAGGCCACCGAGGACC | |
| desaturase | ACCGCTCCGAGTTCGACGCCGCCAAGCCGCCGC | |
| Triticum aestivum | GCGGCGGCTTGGCGGCGTCGAACTCGGAGCGGTGGTCCTCGGT | 6990 |
| Glu10Term | GGCCTTGCAGCTCGCCTACTGCTCCGGCCTCATTGCGGGGGCCA | |
| GAG-TAG | TGGCCGCGGATGGATCTGTGCGTGTGCGTGGGGG | |
| | CGGAGCAGTAGGCGAGC | 6991 |
| | GCTCGCCTACTGCTCCG | 6992 |
| Reduced linolenic acid | ACGCACAGATCCATCCGCGGCCATGGCCCCCGCAATGAGGCCGG | 6993 |
| omega-3 fatty acid | AGCAGGAGGCGAGCTGAAAGGCCACCGAGGACCACCGCTCCGA | |
| desaturase | GTTCGACGCCGCCAAGCCGCCGCCCTTCCGCATC | |
| Triticum aestivum | GATGCGGAAGGGCGGCGGCTTGGCGGCGTCGAACTCGGAGCGG | 6994 |
| Cys13Term | TGGTCCTCGGTGGCCTTTCAGCTCGCCTCCTGCTCCGGCCTCATT | |
| TGC-TGA | GCGGGGGCCATGGCCGCGGATGGATCTGTGCGT | |
| | GCGAGCTGAAAGGCCAC | 6995 |
| | GTGGCCTTTCAGCTCGC | 6996 |
| Reduced linolenic acid | CTTCACAAATCACAAATCGGAATCAGATCCACCACGACACCCCGG | 6997 |
| omega-3 fatty acid | CGGCAATGGCGGCGTAGGCGACCCAGGAGGCCGACTGCAAGGC | |
| desaturase | TTCCGAGGACGCCCGTCTCTTCTTCGACGCCGC | |
| Oryza sativa | GCGGCGTCGAAGAAGAGACGGGCGTCCTCGGAAGCCTTGCAGTC | 6998 |
| Ser4Term | GGCCTCCTGGGTCGCCTACGCCGCCATTGCCGCCGGGGTGTCGT | |
| TCG-TAG | GGTGGATCTGATTCCGATTTGTGATTTGTGAAG | |
| | GGCGGCGTAGGCGACCC | 6999 |
| | GGGTCGCCTACGCCGCC | 7000 |
| Reduced linolenic acid | ATCACAAATCGGAATCAGATCCACCACGACACCCCGGCGGCAATG | 7001 |
| omega-3 fatty acid | GCGGCGTCGGCGACCTAGGAGGCCGACTGCAAGGCTTCCGAGGA | |
| desaturase | CGCCCGTCTCTTCTTCGACGCCGCCAAGCCCC | |
| Oryza sativa | GGGGCTTGGCGGCGTCGAAGAAGAGACGGGCGTCCTCGGAAGC | 7002 |
| Gln7Term | CTTGCAGTCGGCCTCCTAGGTCGCCGACGCCGCCATTGCCGCCG | |
| CAG-TAG | GGGTGTCGTGGTGGATCTGATTCCGATTTGTGAT | |
| | CGGCGACCTAGGAGGCC | 7003 |
| | GGCCTCCTAGGTCGCCG | 7004 |
| Reduced linolenic acid | ACAAATCGGAATCAGATCCACCACGACACCCCGGCGGCAATGGC | 7005 |
| omega-3 fatty acid | GGCGTCGGCGACCCAGTAGGCCGACTGCAAGGCTTCCGAGGACG | |
| desaturase | CCCGTCTCTTCTTCGACGCCGCCAAGCCCCCGC | |
| Oryza sativa | GCGGGGGCTTGGCGGCGTCGAAGAAGAGACGGGCGTCCTCGGA | 7006 |
| Glu8Term | AGCCTTGCAGTCGGCCTACTGGGTCGCCGACGCCGCCATTGCCG | |
| GAG-TAG | CCGGGGTGTCGTGGTGGATCTGATTCCGATTTGT | |
| | CGACCCAGTAGGCCGAC | 7007 |
| | GTCGGCCTACTGGGTCG | 7008 |
| Reduced linolenic acid | TCAGATCCACCACGACACCCCGGCGGCAATGGCGGCGTCGGCGA | 7009 |
| omega-3 fatty acid | CCCAGGAGGCCGACTGAAAGGCTTCCGAGGACGCCCGTCTCTTC | |
| desaturase | TTCGACGCCGCCAAGCCCCCGCCCTTCCGCATC | |
| Oryza sativa | GATGCGGAAGGGCGGGGGCTTGGCGGCGTCGAAGAAGAGACGG | 7010 |
| Cys10Term | GCGTCCTCGGAAGCCTTTCAGTCGGCCTCCTGGGTCGCCGACGC | |
| TGC-TGA | CGCCATTGCCGCCGGGGTGTCGTGGTGGATCTGA | |
| | GCCGACTGAAAGGCTTC | 7011 |
| | GAAGCCTTTCAGTCGGC | 7012 |

[0278] Although a number of embodiments and features are described herein, it will be understood by those skilled in the art that modification and variations of the described embodiments and features may be made without departing from either the spirit of the invention or the scope of the appended claims. All publications and patents cited herein are incorporated by reference in their entireties.

What is claimed is:

1. A method for identifying a cell having a desired oligonucleotide-directed sequence alteration at a first nucleic acid target site within the cell, the method comprising:
identifying said desired sequence alteration in cells that have been selected for the presence of a selectable phenotype conferred by a concurrent oligonucleotide-directed sequence alteration at a second nucleic acid target site within said cells.

2. A method for effecting a desired sequence alteration at a first nucleic acid target site within a cell, the method comprising:
concurrently targeting first and second nucleic acid sites within said cell for sequence alteration with respective first and second sequence-altering oligonucleotides, wherein said second alteration confers a selectable phenotype upon said cell;
selecting cells having said selectable phenotype; and then
identifying among the selected cells a cell having the desired sequence alteration at said first nucleic acid target site.

3. The method of claim 1 or 2, wherein said selectable phenotype is selected from the group consisting of: antibiotic resistance, prototrophy, expression of a fluorescent protein, presence of an epitope, and resistance to an apoptotic signal.

4. The method of claim 1 or 2, wherein the nucleic acid molecule comprising the first nucleic acid target does not comprise the second nucleic acid target.

5. The method of claim 1 or 2, wherein the nucleic acid molecule comprising the first nucleic acid target comprises the second nucleic acid target.

6. The method of claim 1 or 2, wherein the first nucleic acid target site is in a DNA molecule selected from the group consisting of: a chromosome, a plasmid, a YAC, a BAC, a PLAC, a MAC, and a PAC.

7. The method of claim 1 or 2, wherein the cell is selected from the group consisting of: a prokaryotic cell, a fungal cell, a plant cell, an animal cell, and a mammalian cell.

8. A composition for effecting a desired sequence alteration at a first nucleic acid target site within a cell, comprising:
first and second sequence-altering oligonucleotides, wherein the oligonucleotides are capable of effecting sequence alteration at the first nucleic acid target site and at a second nucleic acid target site, respectively; and
wherein alteration of the second nucleic acid target site confers a selectable phenotype.

9. The composition of claim 8, wherein said selectable phenotype is selected from the group consisting of: antibiotic resistance, prototrophy, expression of a fluorescent protein, presence of an epitope, and resistance to an apoptotic signal.

10. The composition of claim 8 further comprising a cellular repair protein.

11. The composition of claim 8, further comprising a cell selected from the group consisting of: a prokaryotic cell, a fungal cell, a plant cell, an animal cell, and a mammalian cell.

12. A kit for effecting a desired sequence alteration at a first nucleic acid target site within a cell, comprising:
first and second sequence-altering oligonucleotides, wherein the oligonucleotides are capable of effecting sequence alteration at the first nucleic acid target site and at a second nucleic acid target site, respectively; and
wherein alteration of the second nucleic acid target site confers a selectable phenotype.

13. The kit of claim 12 further comprising a cellular repair protein.

14. The kit of claim 12, wherein the cellular repair protein is selected from the group consisting of: RAD10, RAD51, RAD52, RAD54, RAD55, MRE11, PMS1 and XRS2.

15. The kit of claim 12 further comprising an HDAC inhibitor; hydroxyurea or lambda phage beta protein.

16. The kit of claim 12 further comprising a cell selected from the group consisting of: a prokaryotic cell, a fungal cell, a plant cell, an animal cell, and a mammalian cell.

17. The kit of claim 16, wherein the cell has increased levels or activity of at least one protein selected from the group consisting of: RAD10, RAD51, RAD52, RAD54, RAD55, MRE11, PMS1 and XRS2.

18. The kit of claim 16, wherein the cell has decreased levels or activity of at least one protein selected from the group consisting of: RAD10, RAD51, RAD52, RAD54, RAD55, MRE11, PMS1 and XRS2.

19. The kit of claim 16, wherein the cell comprises a target nucleic acid sequence, wherein alteration of said target nucleic acid sequence by said second oligonucleotide confers a selectable phenotype.

20. The kit of claim 12, wherein the kit further comprises instructions for performing the method of claim 1 or claim 2.

The application's sequence listing, which the Patent Office published only in electronic form, follows.

SEQUENCE LISTING (4375 sequences)

SEQ ID NO: 1 - DNA, 121 bp, Homo sapiens
agagacccaccgagcggcggcggagggagcagcgccggggcgcacgagggcaccatggcccagacgcccgccttcgacaagcccaaagtgagcgcgcgcgggggctccggggacgggggtc

SEQ ID NO: 2 - DNA, 121 bp, Homo sapiens
gacccccgtccccggagcccccgcgcgcgctcactttgggcttgtcgaaggcgggcgtctgggccatggtgccctcgtgcgccccggcgctgctccctccgccgccgctcggtgggtctct

SEQ ID NO: 3 - DNA, 17 bp, Homo sapiens
ccatggcccagacgccc

SEQ ID NO: 4 - DNA, 17 bp, Homo sapiens
gggcgtctgggccatgg

SEQ ID NO: 5 - DNA, 121 bp, Homo sapiens
tatttgttctctctctccctttctctctctcttccccctgcccccttgcaggtagaactgcatgtccacctagacggatccatcaagcctgaaaccatcttatactatggcaggtaagtcc

SEQ ID NO: 6 - DNA, 121 bp, Homo sapiens
ggacttacctgccatagtataagatggtttcaggcttgatggatccgtctaggtggacatgcagttctacctgcaagggggcagggggaagagagagagaaagggagagagagaacaaata

SEQ ID NO: 7 - DNA, 17 bp, Homo sapiens
tagaactgcatgtccac

SEQ ID NO: 8 - DNA, 17 bp, Homo sapiens
gtggacatgcagttcta

SEQ ID NO: 9 - DNA, 121 bp, Homo sapiens
tccctttctctctctcttccccctgcccccttgcaggtagaactgcatgtccacctagacggatccatcaagcctgaaaccatcttatactatggcaggtaagtccatacagaagagccct

SEQ ID NO: 10 - DNA, 121 bp, Homo sapiens
agggctcttctgtatggacttacctgccatagtataagatggtttcaggcttgatggatccgtctaggtggacatgcagttctacctgcaagggggcagggggaagagagagagaaaggga

SEQ ID NO: 11 - DNA, 17 bp, Homo sapiens
acctagacggatccatc

SEQ ID NO: 12 - DNA, 17 bp, Homo sapiens
gatggatccgtctaggt

SEQ ID NO: 13 - DNA, 121 bp, Homo sapiens
cctggagctcccaagggacttggggaaggttgttcccaacccctttcttcccttcccaggggctgccgggaggctatcaaaaggatcgcctatgagtttgtagagatgaaggccaaagagg

SEQ ID NO: 14 - DNA, 121 bp, Homo sapiens
cctctttggccttcatctctacaaactcataggcgatccttttgatagcctcccggcagcccctgggaagggaagaaaggggttgggaacaaccttccccaagtcccttgggagctccagg

SEQ ID NO: 15 - DNA, 17 bp, Homo sapiens
ctatcgcgggctgccgg

SEQ ID NO: 16 - DNA, 17 bp, Homo sapiens
ccggcagcccgcgatag

SEQ ID NO: 17 - DNA, 121 bp, Homo sapiens
gctcccaagggacttggggaaggttgttcccaacccctttcttcccttcccaggggctgccgggaggctatcaaaaggatcgcctatgagtttgtagagatgaaggccaaagagggcgtgg

SEQ ID NO: 18 - DNA, 121 bp, Homo sapiens
ccacgccctctttggccttcatctctacaaactcataggcgatccttttgatagcctcccggcagcccctgggaagggaagaaaggggttgggaacaaccttccccaagtcccttgggagc

SEQ ID NO: 19 - DNA, 17 bp, Homo sapiens
ggggctgccgggaggct

SEQ ID NO: 20 - DNA, 17 bp, Homo sapiens
agcctcccggcagcccc

SEQ ID NO: 21 - DNA, 121 bp, Homo sapiens
ttggggaaggttgttcccaacccctttcttcccttcccaggggctgccgggaggctatcaaaaggatcgcctatgagtttgtagagatgaaggccaaagagggcgtggtgtatgtggaggt

SEQ ID NO: 22 - DNA, 121 bp, Homo sapiens
acctccacatacaccacgccctctttggccttcatctctacaaactcataggcgatccttttgatagcctcccggcagcccctgggaagggaagaaaggggttgggaacaaccttccccaa

SEQ ID NO: 23 - DNA, 17 bp, Homo sapiens
ggctatcaaaaggatcg

SEQ ID NO: 24 - DNA, 17 bp, Homo sapiens
cgatccttttgatagcc

SEQ ID NO: 25 - DNA, 121 bp, Homo sapiens
gttgttcccaacccctttcttcccttcccaggggctgccgggaggctatcaaaaggatcgcctatgagtttgtagagatgaaggccaaagagggcgtggtgtatgtggaggtgcggtacag

SEQ ID NO: 26 - DNA, 121 bp, Homo sapiens
ctgtaccgcacctccacatacaccacgccctctttggccttcatctctacaaactcataggcgatccttttgatagcctcccggcagcccctgggaagggaagaaaggggttgggaacaac

SEQ ID NO: 27 - DNA, 17 bp, Homo sapiens
aaggatcgcctatgagt

SEQ ID NO: 28 - DNA, 17 bp, Homo sapiens
actcataggcgatcctt

SEQ ID NO: 29 - DNA, 121 bp, Homo sapiens
aggctatcaaaaggatcgcctatgagtttgtagagatgaaggccaaagagggcgtggtgtatgtggaggtgcggtacagtccgcacctgctggccaactccaaagtggagccaatcccctg

SEQ ID NO: 30 - DNA, 121 bp, Homo sapiens
caggggattggctccactttggagttggccagcaggtgcggactgtaccgcacctccacatacaccacgccctctttggccttcatctctacaaactcataggcgatccttttgatagcct

SEQ ID NO: 31 - DNA, 17 bp, Homo sapiens
cgtggtgtatgtggagg

SEQ ID NO: 32 - DNA, 17 bp, Homo sapiens
cctccacatacaccacg

SEQ ID NO: 33 - DNA, 121 bp, Homo sapiens
ggatcgcctatgagtttgtagagatgaaggccaaagagggcgtggtgtatgtggaggtgcggtacagtccgcacctgctggccaactccaaagtggagccaatcccctggaaccaggctga

SEQ ID NO: 34 - DNA, 121 bp, Homo sapiens
tcagcctggttccaggggattggctccactttggagttggccagcaggtgcggactgtaccgcacctccacatacaccacgccctctttggccttcatctctacaaactcataggcgatcc

SEQ ID NO: 35 - DNA, 17 bp, Homo sapiens
ggaggtgcggtacagtc

SEQ ID NO: 36 - DNA, 17 bp, Homo sapiens
gactgtaccgcacctcc

SEQ ID NO: 37 - DNA, 121 bp, Homo sapiens; identical to SEQ ID NO: 33

SEQ ID NO: 38 - DNA, 121 bp, Homo sapiens; identical to SEQ ID NO: 34

SEQ ID NO: 39 - DNA, 17 bp, Homo sapiens
ggaggtgcggtacagtc

SEQ ID NO: 40 - DNA, 17 bp, Homo sapiens
gactgtaccgcacctcc

SEQ ID NO: 41 - DNA, 121 bp, Homo sapiens
aggatcgcctatgagtttgtagagatgaaggccaaagagggcgtggtgtatgtggaggtgcggtacagtccgcacctgctggccaactccaaagtggagccaatcccctggaaccaggctg

SEQ ID NO: 42 - DNA, 121 bp, Homo sapiens
cagcctggttccaggggattggctccactttggagttggccagcaggtgcggactgtaccgcacctccacatacaccacgccctctttggccttcatctctacaaactcataggcgatcct

SEQ ID NO: 43 - DNA, 17 bp, Homo sapiens
tggaggtgcggtacagt

SEQ ID NO: 44 - DNA, 17 bp, Homo sapiens
actgtaccgcacctcca

SEQ ID NO: 45 - DNA, 121 bp, Homo sapiens
atgagtttgtagagatgaaggccaaagagggcgtggtgtatgtggaggtgcggtacagtccgcacctgctggccaactccaaagtggagccaatcccctggaaccaggctgagtgagtgat

SEQ ID NO: 46 - DNA, 121 bp, Homo sapiens
atcactcactcagcctggttccaggggattggctccactttggagttggccagcaggtgcggactgtaccgcacctccacatacaccacgccctctttggccttcatctctacaaactcat

SEQ ID NO: 47 - DNA, 17 bp, Homo sapiens
gtacagtccgcacctgc

SEQ ID NO: 48 - DNA, 17 bp, Homo sapiens
gcaggtgcggactgtac

SEQ ID NO: 49 - DNA, 121 bp, Homo sapiens
tttgtagagatgaaggccaaagagggcgtggtgtatgtggaggtgcggtacagtccgcacctgctggccaactccaaagtggagccaatcccctggaaccaggctgagtgagtgatgggcc

SEQ ID NO: 50 - DNA, 121 bp, Homo sapiens
ggcccatcactcactcagcctggttccaggggattggctccactttggagttggccagcaggtgcggactgtaccgcacctccacatacaccacgccctctttggccttcatctctacaaa

SEQ ID NO: 51 - DNA, 17 bp, Homo sapiens
gtccgcacctgctggcc

SEQ ID NO: 52 - DNA, 17 bp, Homo sapiens
ggccagcaggtgcggac

SEQ ID NO: 53 - DNA, 121 bp, Homo sapiens
tagagatgaaggccaaagagggcgtggtgtatgtggaggtgcggtacagtccgcacctgctggccaactccaaagtggagccaatcccctggaaccaggctgagtgagtgatgggcctgga

SEQ ID NO: 54 - DNA, 121 bp, Homo sapiens
tccaggcccatcactcactcagcctggttccaggggattggctccactttggagttggccagcaggtgcggactgtaccgcacctccacatacaccacgccctctttggccttcatctcta

SEQ ID NO: 55 - DNA, 17 bp, Homo sapiens
gcacctgctggccaact

SEQ ID NO: 56 - DNA, 17 bp, Homo sapiens
agttggccagcaggtgc

SEQ ID NO: 57 - DNA, 121 bp, Homo sapiens
gccttccttttgcctcaggcccatccctactcctctcctcacacagaggggacctcaccccagacgaggtggtggccctagtgggccagggcctgcaggagggggagcgagacttcggggt

SEQ ID NO: 58 - DNA, 121 bp, Homo sapiens
accccgaagtctcgctccccctcctgcaggccctggcccactagggccaccacctcgtctggggtgaggtcccctctgtgtgaggagaggagtagggatgggcctgaggcaaaaggaaggc

SEQ ID NO: 59 - DNA, 17 bp, Homo sapiens
cctcaccccagacgagg

SEQ ID NO: 60 - DNA, 17 bp, Homo sapiens
cctcgtctggggtgagg

SEQ ID NO: 61 - DNA, 121 bp, Homo sapiens
tttgcctcaggcccatccctactcctctcctcacacagaggggacctcaccccagacgaggtggtggccctagtgggccagggcctgcaggagggggagcgagacttcggggtcaaggccc

SEQ ID NO: 62 - DNA, 121 bp, Homo sapiens
gggccttgaccccgaagtctcgctccccctcctgcaggccctggcccactagggccaccacctcgtctggggtgaggtcccctctgtgtgaggagaggagtagggatgggcctgaggcaaa

SEQ ID NO: 63 - DNA, 17 bp, Homo sapiens
cagacgaggtggtggcc

SEQ ID NO: 64 - DNA, 17 bp, Homo sapiens
ggccaccacctcgtctg

SEQ ID NO: 65 - DNA, 121 bp, Homo sapiens
acagaggggacctcaccccagacgaggtggtggccctagtgggccagggcctgcaggagggggagcgagacttcggggtcaaggcccggtccatcctgtgctgcatgcgccaccagcccag

SEQ ID NO: 66 - DNA, 121 bp, Homo sapiens
ctgggctggtggcgcatgcagcacaggatggaccgggccttgaccccgaagtctcgctccccctcctgcaggccctggcccactagggccaccacctcgtctggggtgaggtcccctctgt

SEQ ID NO: 67 - DNA, 17 bp, Homo sapiens
gcaggagggggagcgag

SEQ ID NO: 68 - DNA, 17 bp, Homo sapiens
ctcgctccccctcctgc

SEQ ID NO: 69 - DNA, 121 bp, Homo sapiens
gggacctcaccccagacgaggtggtggccctagtgggccagggcctgcaggagggggagcgagacttcggggtcaaggcccggtccatcctgtgctgcatgcgccaccagcccagtgagta

SEQ ID NO: 70 - DNA, 121 bp, Homo sapiens
tactcactgggctggtggcgcatgcagcacaggatggaccgggccttgaccccgaagtctcgctccccctcctgcaggccctggcccactagggccaccacctcgtctggggtgaggtccc

SEQ ID NO: 71 - DNA, 17 bp, Homo sapiens
gggggagcgagacttcg

SEQ ID NO: 72 - DNA, 17 bp, Homo sapiens
cgaagtctcgctccccc

SEQ ID NO: 73 - DNA, 121 bp, Homo sapiens
ggggacctcaccccagacgaggtggtggccctagtgggccagggcctgcaggagggggagcgagacttcggggtcaaggcccggtccatcctgtgctgcatgcgccaccagcccagtgagt

SEQ ID NO: 74 - DNA, 121 bp, Homo sapiens
actcactgggctggtggcgcatgcagcacaggatggaccgggccttgaccccgaagtctcgctccccctcctgcaggccctggcccactagggccaccacctcgtctggggtgaggtcccc

SEQ ID NO: 75 - DNA, 17 bp, Homo sapiens
agggggagcgagacttc

SEQ ID NO: 76 - DNA, 17 bp, Homo sapiens
gaagtctcgctccccct

SEQ ID NO: 77 - DNA, 121 bp, Homo sapiens
tggtggccctagtgggccagggcctgcaggagggggagcgagacttcggggtcaaggcccggtccatcctgtgctgcatgcgccaccagcccagtgagtaggatcaccgccctgcccaggg

SEQ ID NO: 78 - DNA, 121 bp, Homo sapiens
ccctgggcagggcggtgatcctactcactgggctggtggcgcatgcagcacaggatggaccgggccttgaccccgaagtctcgctccccctcctgcaggccctggcccactagggccacca

SEQ ID NO: 79 - DNA, 17 bp, Homo sapiens
caaggcccggtccatcc

SEQ ID NO: 80 - DNA, 17 bp, Homo sapiens
ggatggaccgggccttg

SEQ ID NO: 81 - DNA, 121 bp, Homo sapiens
gtggtggccctagtgggccagggcctgcaggagggggagcgagacttcggggtcaaggcccggtccatcctgtgctgcatgcgccaccagcccagtgagtaggatcaccgccctgcccagg

SEQ ID NO: 82 - DNA, 121 bp, Homo sapiens
cctgggcagggcggtgatcctactcactgggctggtggcgcatgcagcacaggatggaccgggccttgaccccgaagtctcgctccccctcctgcaggccctggcccactagggccaccac

SEQ ID NO: 83 - DNA, 17 bp, Homo sapiens
tcaaggcccggtccatc

SEQ ID NO: 84 - DNA, 17 bp, Homo sapiens
gatggaccgggccttga

SEQ ID NO: 85 - DNA, 121 bp, Homo sapiens
ctagtgggccagggcctgcaggagggggagcgagacttcggggtcaaggcccggtccatcctgtgctgcatgcgccaccagcccagtgagtaggatcaccgccctgcccagggccgcccgt

SEQ ID NO: 86 - DNA, 121 bp, Homo sapiens
acgggcggccctgggcagggcggtgatcctactcactgggctggtggcgcatgcagcacaggatggaccgggccttgaccccgaagtctcgctccccctcctgcaggccctggcccactag

SEQ ID NO: 87 - DNA, 17 bp, Homo sapiens
ggtccatcctgtgctgc

SEQ ID NO: 88 - DNA, 17 bp, Homo sapiens
gcagcacaggatggacc

SEQ ID NO: 89 - DNA, 121 bp, Homo sapiens
ggcctgcaggagggggagcgagacttcggggtcaaggcccggtccatcctgtgctgcatgcgccaccagcccagtgagtaggatcaccgccctgcccagggccgcccgtctcaccctggcc

SEQ ID NO: 90 - DNA, 121 bp, Homo sapiens
ggccagggtgagacgggcggccctgggcagggcggtgatcctactcactgggctggtggcgcatgcagcacaggatggaccgggccttgaccccgaagtctcgctccccctcctgcaggcc

SEQ ID NO: 91 - DNA, 17 bp, Homo sapiens
gctgcatgcgccaccag

SEQ ID NO: 92 - DNA, 17 bp, Homo sapiens
ctggtggcgcatgcagc

SEQ ID NO: 93 - DNA, 121 bp, Homo sapiens
gcctgcaggagggggagcgagacttcggggtcaaggcccggtccatcctgtgctgcatgcgccaccagcccagtgagtaggatcaccgccctgcccagggccgcccgtctcaccctggccc

SEQ ID NO: 94 - DNA, 121 bp, Homo sapiens
gggccagggtgagacgggcggccctgggcagggcggtgatcctactcactgggctggtggcgcatgcagcacaggatggaccgggccttgaccccgaagtctcgctccccctcctgcaggc

SEQ ID NO: 95 - DNA, 17 bp, Homo sapiens
ctgcatgcgccaccagc

SEQ ID NO: 96 - DNA, 17 bp, Homo sapiens
gctggtggcgcatgcag

SEQ ID NO: 97 - DNA, 121 bp, Homo sapiens
ctgcccacagactggtcccccaaggtggtggagctgtgtaagaagtaccagcagcagaccgtggtagccattgacctggctggagatgagaccatcccaggaagcagcctcttgcctggac

SEQ ID NO: 98 - DNA, 121 bp, Homo sapiens
gtccaggcaagaggctgcttcctgggatggtctcatctccagccaggtcaatggctaccacggtctgctgctggtacttcttacacagctccaccaccttgggggaccagtctgtgggcag

SEQ ID NO: 99 - DNA, 17 bp, Homo sapiens
agcagaccgtggtagcc

SEQ ID NO: 100 - DNA, 17 bp, Homo sapiens
ggctaccacggtctgct

SEQ ID NO: 101 - DNA, 121 bp, Homo sapiens
cagactggtcccccaaggtggtggagctgtgtaagaagtaccagcagcagaccgtggtagccattgacctggctggagatgagaccatcccaggaagcagcctcttgcctggacatgtcca

SEQ ID NO: 102 - DNA, 121 bp, Homo sapiens
tggacatgtccaggcaagaggctgcttcctgggatggtctcatctccagccaggtcaatggctaccacggtctgctgctggtacttcttacacagctccaccaccttgggggaccagtctg

SEQ ID NO: 103 - DNA, 17 bp, Homo sapiens
cgtggtagccattgacc

SEQ ID NO: 104 - DNA, 17 bp, Homo sapiens
ggtcaatggctaccacg

SEQ ID NO: 105 - DNA, 121 bp, Homo sapiens
ccattgacctggctggagatgagaccatcccaggaagcagcctcttgcctggacatgtccaggcctaccaggtgggtcctgtgagaaggaatggagaggctggccctgggtgagcttgtct

SEQ ID NO: 106 - DNA, 121 bp, Homo sapiens
agacaagctcacccagggccagcctctccattccttctcacaggacccacctggtaggcctggacatgtccaggcaagaggctgcttcctgggatggtctcatctccagccaggtcaatgg

SEQ ID NO: 107 - DNA, 17 bp, Homo sapiens
acatgtccaggcctacc

SEQ ID NO: 108 - DNA, 17 bp, Homo sapiens
ggtaggcctggacatgt

SEQ ID NO: 109 - DNA, 121 bp, Homo sapiens
gctagggcacccatgacctggctctcccccttccaggaggctgtgaagagcggcattcaccgtactgtccacgccggggaggtgggctcggccgaagtagtaaaagaggtgagggcctggg

SEQ ID NO: 110 - DNA, 121 bp, Homo sapiens
cccaggccctcacctcttttactacttcggccgagcccacctccccggcgtggacagtacggtgaatgccgctcttcacagcctcctggaagggggagagccaggtcatgggtgccctagc

SEQ ID NO: 111 - DNA, 17 bp, Homo sapiens
gcattcaccgtactgtc

SEQ ID NO: 112 - DNA, 17 bp, Homo sapiens
gacagtacggtgaatgc

SEQ ID NO: 113 - DNA, 121 bp, Homo sapiens
ctagggcacccatgacctggctctcccccttccaggaggctgtgaagagcggcattcaccgtactgtccacgccggggaggtgggctcggccgaagtagtaaaagaggtgagggcctgggc

SEQ ID NO: 114 - DNA, 121 bp, Homo sapiens
gcccaggccctcacctcttttactacttcggccgagcccacctccccggcgtggacagtacggtgaatgccgctcttcacagcctcctggaagggggagagccaggtcatgggtgccctag

SEQ ID NO: 115 - DNA, 17 bp, Homo sapiens
cattcaccgtactgtcc

SEQ ID NO: 116 - DNA, 17 bp, Homo sapiens
ggacagtacggtgaatg

SEQ ID NO: 117 - DNA, 121 bp, Homo sapiens
atgacctggctctcccccttccaggaggctgtgaagagcggcattcaccgtactgtccacgccggggaggtgggctcggccgaagtagtaaaagaggtgagggcctgggctggccatgggg

SEQ ID NO: 118 - DNA, 121 bp, Homo sapiens
ccccatggccagcccaggccctcacctcttttactacttcggccgagcccacctccccggcgtggacagtacggtgaatgccgctcttcacagcctcctggaagggggagagccaggtcat

SEQ ID NO: 119 - DNA, 17 bp, Homo sapiens
ctgtccacgccggggag

SEQ ID NO: 120 - DNA, 17 bp, Homo sapiens
ctccccggcgtggacag

SEQ ID NO: 121 - DNA, 121 bp, Homo sapiens
acctggctctcccccttccaggaggctgtgaagagcggcattcaccgtactgtccacgccggggaggtgggctcggccgaagtagtaaaagaggtgagggcctgggctggccatggggtcc

SEQ ID NO: 122 - DNA, 121 bp, Homo sapiens
ggaccccatggccagcccaggccctcacctcttttactacttcggccgagcccacctccccggcgtggacagtacggtgaatgccgctcttcacagcctcctggaagggggagagccaggt

SEQ ID NO: 123 - DNA, 17 bp, Homo sapiens
tccacgccggggaggtg

SEQ ID NO: 124 - DNA, 17 bp, Homo sapiens
cacctccccggcgtgga

SEQ ID NO: 125 - DNA, 121 bp, Homo sapiens
tggctctcccccttccaggaggctgtgaagagcggcattcaccgtactgtccacgccggggaggtgggctcggccgaagtagtaaaagaggtgagggcctgggctggccatggggtccctc

SEQ ID NO: 126 - DNA, 121 bp, Homo sapiens
gagggaccccatggccagcccaggccctcacctcttttactacttcggccgagcccacctccccggcgtggacagtacggtgaatgccgctcttcacagcctcctggaagggggagagcca

SEQ ID NO: 127 - DNA, 17 bp, Homo sapiens
acgccggggaggtgggc

SEQ ID NO: 128 - DNA, 17 bp, Homo sapiens
gcccacctccccggcgt

SEQ ID NO: 129 - DNA, 121 bp, Homo sapiens
ctgcctcctcccatacttggctctattctgcttctctacaggctgtggacatactcaagacagagcggctgggacacggctaccacaccctggaagaccaggccctttataacaggctgcg

SEQ ID NO: 130 - DNA, 121 bp, Homo sapiens
cgcagcctgttataaagggcctggtcttccagggtgtggtagccgtgtcccagccgctctgtcttgagtatgtccacagcctgtagagaagcagaatagagccaagtatgggaggaggcag

SEQ ID NO: 131 - DNA, 17 bp, Homo sapiens
actcaagacagagcggc

SEQ ID NO: 132 - DNA, 17 bp, Homo sapiens
gccgctctgtcttgagt

SEQ ID NO: 133 - DNA, 121 bp, Homo sapiens
cagagcggctgggacacggctaccacaccctggaagaccaggccctttataacaggctgcggcaggaaaacatgcacttcgaggtaagcgggccagggagtggggaggaaccatccccggc

SEQ ID NO: 134 - DNA, 121 bp, Homo sapiens
gccggggatggttcctccccactccctggcccgcttacctcgaagtgcatgttttcctgccgcagcctgttataaagggcctggtcttccagggtgtggtagccgtgtcccagccgctctg

SEQ ID NO: 135 - DNA, 17 bp, Homo sapiens
caggctgcggcaggaaa

SEQ ID NO: 136 - DNA, 17 bp, Homo sapiens
tttcctgccgcagcctg

SEQ ID NO: 137 - DNA, 121 bp, Homo sapiens
gagcggctgggacacggctaccacaccctggaagaccaggccctttataacaggctgcggcaggaaaacatgcacttcgaggtaagcgggccagggagtggggaggaaccatccccggctg

SEQ ID NO: 138 - DNA, 121 bp, Homo sapiens
cagccggggatggttcctccccactccctggcccgcttacctcgaagtgcatgttttcctgccgcagcctgttataaagggcctggtcttccagggtgtggtagccgtgtcccagccgctc

SEQ ID NO: 139 - DNA, 17 bp, Homo sapiens
ggctgcggcaggaaaac

SEQ ID NO: 140 - DNA, 17 bp, Homo sapiens
gttttcctgccgcagcc

SEQ ID NO: 141 - DNA, 121 bp, Homo sapiens
ccacacacctgctcttccagatctgcccctggtccagctacctcactggtgcctggaagccggacacggagcatgcagtcattcggtgagctctgttcccctgggcctgttcaattttgtt

SEQ ID NO: 142 - DNA, 121 bp, Homo sapiens
aacaaaattgaacaggcccaggggaacagagctcaccgaatgactgcatgctccgtgtccggcttccaggcaccagtgaggtagctggaccaggggcagatctggaagagcaggtgtgtgg

SEQ ID NO: 143 - DNA, 17 bp, Homo sapiens
ctggaagccggacacgg

SEQ ID NO: 144 - DNA, 17 bp, Homo sapiens
ccgtgtccggcttccag

SEQ ID NO: 145 - DNA, 121 bp, Homo sapiens
ggaggctgattctctcctcctccctcttctgcaggctcaaaaatgaccaggctaactactcgctcaacacagatgacccgctcatcttcaagtccaccctggacactgattaccagatgac

SEQ ID NO: 146 - DNA, 121 bp, Homo sapiens
gtcatctggtaatcagtgtccagggtggacttgaagatgagcgggtcatctgtgttgagcgagtagttagcctggtcatttttgagcctgcagaagagggaggaggagagaatcagcctcc

SEQ ID NO: 147 - DNA, 17 bp, Homo sapiens
taactactcgctcaaca

SEQ ID NO: 148 - DNA, 17 bp, Homo sapiens
tgttgagcgagtagtta

SEQ ID NO: 149 - DNA, 121 bp, Homo sapiens
cctccctcttctgcaggctcaaaaatgaccaggctaactactcgctcaacacagatgacccgctcatcttcaagtccaccctggacactgattaccagatgaccaaacgggacatgggctt

SEQ ID NO: 150 - DNA, 121 bp, Homo sapiens
aagcccatgtcccgtttggtcatctggtaatcagtgtccagggtggacttgaagatgagcgggtcatctgtgttgagcgagtagttagcctggtcatttttgagcctgcagaagagggagg

SEQ ID NO: 151 - DNA, 17 bp, Homo sapiens
agatgacccgctcatct

SEQ ID NO: 152 - DNA, 17 bp, Homo sapiens
agatgagcgggtcatct

SEQ ID NO: 153 - DNA, 121 bp, Homo sapiens
aaaatgaccaggctaactactcgctcaacacagatgacccgctcatcttcaagtccaccctggacactgattaccagatgaccaaacgggacatgggctttactgaagaggagtttaaaag

SEQ ID NO: 154 - DNA, 121 bp, Homo sapiens
cttttaaactcctcttcagtaaagcccatgtcccgtttggtcatctggtaatcagtgtccagggtggacttgaagatgagcgggtcatctgtgttgagcgagtagttagcctggtcatttt

SEQ ID NO: 155 - DNA, 17 bp, Homo sapiens
gtccaccctggacactg

SEQ ID NO: 156 - DNA, 17 bp, Homo sapiens
cagtgtccagggtggac

SEQ ID NO: 157 - DNA, 121 bp, Homo sapiens
gccttctttgttctctggttccatgttgtctgccattctggcctttccagaacatcaatgcggccaaatctagtttcctcccagaagatgaaaagagggagcttctcgacctgctctataa

SEQ ID NO: 158 - DNA, 121 bp, Homo sapiens
ttatagagcaggtcgagaagctccctcttttcatcttctgggaggaaactagatttggccgcattgatgttctggaaaggccagaatggcagacaacatggaaccagagaacaaagaaggc

SEQ ID NO: 159 - DNA, 17 bp, Homo sapiens
catcaatgcggccaaat

SEQ ID NO: 160 - DNA, 17 bp, Homo sapiens
atttggccgcattgatg

SEQ ID NO: 161 - DNA, 121 bp, Homo sapiens
gactgtaccaccatccactacaactacatgtgtaacagttcctgcatgggcggcatgaaccggaggcccatcctcaccatcatcacactggaagactccaggtcaggagccacttgccacc

SEQ ID NO: 162 - DNA, 121 bp, Homo sapiens
ggtggcaagtggctcctgacctggagtcttccagtgtgatgatggtgaggatgggcctccggttcatgccgcccatgcaggaactgttacacatgtagttgtagtggatggtggtacagtc

SEQ ID NO: 163 - DNA, 17 bp, Homo sapiens
gcatgaaccggaggccc

SEQ ID NO: 164 - DNA, 17 bp, Homo sapiens
gggcctccggttcatgc

SEQ ID NO: 165 - DNA, 121 bp, Homo sapiens
tgtaacagttcctgcatgggcggcatgaaccggaggcccatcctcaccatcatcacactggaagactccaggtcaggagccacttgccaccctgcacactggcctgctgtgccccagcctc

SEQ ID NO: 166 - DNA, 121 bp, Homo sapiens
gaggctggggcacagcaggccagtgtgcagggtggcaagtggctcctgacctggagtcttccagtgtgatgatggtgaggatgggcctccggttcatgccgcccatgcaggaactgttaca

SEQ ID NO: 167 - DNA, 17 bp, Homo sapiens
tcacactggaagactcc

SEQ ID NO: 168 - DNA, 17 bp, Homo sapiens
ggagtcttccagtgtga

SEQ ID NO: 169 - DNA, 121 bp, Homo sapiens
gttggctctgactgtaccaccatccactacaactacatgtgtaacagttcctgcatgggcggcatgaaccggaggcccatcctcaccatcatcacactggaagactccaggtcaggagcca

SEQ ID NO: 170 - DNA, 121 bp, Homo sapiens
tggctcctgacctggagtcttccagtgtgatgatggtgaggatgggcctccggttcatgccgcccatgcaggaactgttacacatgtagttgtagtggatggtggtacagtcagagccaac

SEQ ID NO: 171 - DNA, 17 bp, Homo sapiens
gcatgggcggcatgaac

SEQ ID NO: 172 - DNA, 17 bp, Homo sapiens
gttcatgccgcccatgc

SEQ ID NO: 173 - DNA, 121 bp, Homo sapiens
tccactacaactacatgtgtaacagttcctgcatgggcggcatgaaccggaggcccatcctcaccatcatcacactggaagactccaggtcaggagccacttgccaccctgcacactggcc

SEQ ID NO: 174 - DNA, 121 bp, Homo sapiens
ggccagtgtgcagggtggcaagtggctcctgacctggagtcttccagtgtgatgatggtgaggatgggcctccggttcatgccgcccatgcaggaactgttacacatgtagttgtagtgga

SEQ ID NO: 175 - DNA, 17 bp, Homo sapiens
gcccatcctcaccatca

SEQ ID NO: 176 - DNA, 17 bp, Homo sapiens
tgatggtgaggatgggc

SEQ ID NO: 177 - DNA, 121 bp, Homo sapiens
taccaccatccactacaactacatgtgtaacagttcctgcatgggcggcatgaaccggaggcccatcctcaccatcatcacactggaagactccaggtcaggagccacttgccaccctgca

SEQ ID NO: 178 - DNA, 121 bp, Homo sapiens
tgcagggtggcaagtggctcctgacctggagtcttccagtgtgatgatggtgaggatgggcctccggttcatgccgcccatgcaggaactgttacacatgtagttgtagtggatggtggta

SEQ ID NO: 179 - DNA, 17 bp, Homo sapiens
aaccggaggcccatcct

SEQ ID NO: 180 - DNA, 17 bp, Homo sapiens
aggatgggcctccggtt

SEQ ID NO: 181 - DNA, 121 bp, Homo sapiens
ctggccaagacctgccctgtgcagctgtgggttgattccacacccccgcccggcacccgcgtccgcgccatggccatctacaagcagtcacagcacatgacggaggttgtgaggcgctgcc

SEQ ID NO: 182 - DNA, 121 bp, Homo sapiens
ggcagcgcctcacaacctccgtcatgtgctgtgactgcttgtagatggccatggcgcggacgcgggtgccgggcgggggtgtggaatcaacccacagctgcacagggcaggtcttggccag

SEQ ID NO: 183 - DNA, 17 bp, Homo sapiens
gcacccgcgtccgcgcc

SEQ ID NO: 184 - DNA, 17 bp, Homo sapiens
ggcgcggacgcgggtgc

SEQ ID NO: 185 - DNA, 121 bp, Homo sapiens
ttggctctgactgtaccaccatccactacaactacatgtgtaacagttcctgcatgggcggcatgaaccggaggcccatcctcaccatcatcacactggaagactccaggtcaggagccac

SEQ ID NO: 186 - DNA, 121 bp, Homo sapiens
gtggctcctgacctggagtcttccagtgtgatgatggtgaggatgggcctccggttcatgccgcccatgcaggaactgttacacatgtagttgtagtggatggtggtacagtcagagccaa

SEQ ID NO: 187 - DNA, 17 bp, Homo sapiens
catgggcggcatgaacc

SEQ ID NO: 188 - DNA, 17 bp, Homo sapiens
ggttcatgccgcccatg

SEQ ID NO: 189 - DNA, 121 bp, Homo sapiens
actgtaccaccatccactacaactacatgtgtaacagttcctgcatgggcggcatgaaccggaggcccatcctcaccatcatcacactggaagactccaggtcaggagccacttgccaccc

SEQ ID NO: 190 - DNA, 121 bp, Homo sapiens
gggtggcaagtggctcctgacctggagtcttccagtgtgatgatggtgaggatgggcctccggttcatgccgcccatgcaggaactgttacacatgtagttgtagtggatggtggtacagt

SEQ ID NO: 191 - DNA, 17 bp, Homo sapiens
catgaaccggaggccca

SEQ ID NO: 192 - DNA, 17 bp, Homo sapiens
tgggcctccggttcatg

SEQ ID NO: 193 - DNA, 121 bp, Homo sapiens
ccctgactttcaactctgtctccttcctcttcctacagtactcccctgccctcaacaagatgttttgccaactggccaagacctgccctgtgcagctgtgggttgattccacacccccgcc

SEQ ID NO: 194 - DNA, 121 bp, Homo sapiens
ggcgggggtgtggaatcaacccacagctgcacagggcaggtcttggccagttggcaaaacatcttgttgagggcaggggagtactgtaggaagaggaaggagacagagttgaaagtcaggg

SEQ ID NO: 195 - DNA, 17 bp, Homo sapiens
caacaagatgttttgcc

SEQ ID NO: 196 - DNA, 17 bp, Homo sapiens
ggcaaaacatcttgttg

SEQ ID NO: 197 - DNA, 121 bp, Homo sapiens
tcttgcttctcttttcctatcctgagtagtggtaatctactgggacggaacagctttgaggtgcgtgtttgtgcctgtcctgggagagaccggcgcacagaggaagagaatctccgcaaga

SEQ ID NO: 198 - DNA, 121 bp, Homo sapiens
tcttgcggagattctcttcctctgtgcgccggtctctcccaggacaggcacaaacacgcacctcaaagctgttccgtcccagtagattaccactactcaggataggaaaagagaagcaaga

SEQ ID NO: 199 - DNA, 17 bp, Homo sapiens
gctttgaggtgcgtgtt

SEQ ID NO: 200 - DNA, 17 bp, Homo sapiens
aacacgcacctcaaagc

SEQ ID NO: 201 - DNA, 121 bp, Homo sapiens
ttatctcctaggttggctctgactgtaccaccatccactacaactacatgtgtaacagttcctgcatgggcggcatgaaccggaggcccatcctcaccatcatcacactggaagactccag

SEQ ID NO: 202 - DNA, 121 bp, Homo sapiens
ctggagtcttccagtgtgatgatggtgaggatgggcctccggttcatgccgcccatgcaggaactgttacacatgtagttgtagtggatggtggtacagtcagagccaacctaggagataa

SEQ ID NO: 203 - DNA, 17 bp, Homo sapiens
taacagttcctgcatgg

SEQ ID NO: 204 - DNA, 17 bp, Homo sapiens
ccatgcaggaactgtta

SEQ ID NO: 205 - DNA, 121 bp, Homo sapiens
cagaaaacctaccagggcagctacggtttccgtctgggcttcttgcattctgggacagccaagtctgtgacttgcacggtcagttgccctgaggggctggcttccatgagacttcaatgcc

SEQ ID NO: 206 - DNA, 121 bp, Homo sapiens
ggcattgaagtctcatggaagccagcccctcagggcaactgaccgtgcaagtcacagacttggctgtcccagaatgcaagaagcccagacggaaaccgtagctgccctggtaggttttctg

SEQ ID NO: 207 - DNA, 17 bp, Homo sapiens
ggacagccaagtctgtg

SEQ ID NO: 208 - DNA, 17 bp, Homo sapiens
cacagacttggctgtcc

SEQ ID NO: 209 - DNA, 121 bp, Homo sapiens
ggtaatctactgggacggaacagctttgaggtgcgtgtttgtgcctgtcctgggagagaccggcgcacagaggaagagaatctccgcaagaaaggggagcctcaccacgagctgcccccag

SEQ ID NO: 210 - DNA, 121 bp, Homo sapiens
ctgggggcagctcgtggtgaggctcccctttcttgcggagattctcttcctctgtgcgccggtctctcccaggacaggcacaaacacgcacctcaaagctgttccgtcccagtagattacc

SEQ ID NO: 211 - DNA, 17 bp, Homo sapiens
ggagagaccggcgcaca

SEQ ID NO: 212 - DNA, 17 bp, Homo sapiens
tgtgcgccggtctctcc

SEQ ID NO: 213 - DNA, 121 bp, Homo sapiens
gcttctcttttcctatcctgagtagtggtaatctactgggacggaacagctttgaggtgcgtgtttgtgcctgtcctgggagagaccggcgcacagaggaagagaatctccgcaagaaagg

SEQ ID NO: 214 - DNA, 121 bp, Homo sapiens
cctttcttgcggagattctcttcctctgtgcgccggtctctcccaggacaggcacaaacacgcacctcaaagctgttccgtcccagtagattaccactactcaggataggaaaagagaagc

SEQ ID NO: 215 - DNA, 17 bp, Homo sapiens
tgaggtgcgtgtttgtg

SEQ ID NO: 216 - DNA, 17 bp, Homo sapiens
cacaaacacgcacctca

SEQ ID NO: 217 - DNA, 121 bp, Homo sapiens
tcctagcactgcccaacaacaccagctcctctccccagccaaagaagaaaccactggatggagaatatttcacccttcaggtactaagtcttgggacctcttatcaagtggaaagtttcca

SEQ ID NO: 218 - DNA, 121 bp, Homo sapiens
tggaaactttccacttgataagaggtcccaagacttagtacctgaagggtgaaatattctccatccagtggtttcttctttggctggggagaggagctggtgttgttgggcagtgctagga

SEQ ID NO: 219 - DNA, 17 bp, Homo sapiens
actggatggagaatatt

SEQ ID NO: 220 - DNA, 17 bp, Homo sapiens
aatattctccatccagt

SEQ ID NO: 221 - DNA, 121 bp, Homo sapiens
aatggttcactgaagacccaggtccagatgaagctcccagaatgccagaggctgctccccgcgtggcccctgcaccagcagctcctacaccggcggcccctgcaccagccccctcctggcc

SEQ ID NO: 222 - DNA, 121 bp, Homo sapiens
ggccaggagggggctggtgcaggggccgccggtgtaggagctgctggtgcaggggccacgcggggagcagcctctggcattctgggagcttcatctggacctgggtcttcagtgaaccatt

SEQ ID NO: 223 - DNA, 17 bp, Homo sapiens
tgctccccgcgtggccc

SEQ ID NO: 224 - DNA, 17 bp, Homo sapiens
gggccacgcggggagca

SEQ ID NO: 225 - DNA, 121 bp, Homo sapiens
aagctcccagaatgccagaggctgctccccgcgtggcccctgcaccagcagctcctacaccggcggcccctgcaccagccccctcctggcccctgtcatcttctgtcccttcccagaaaac

SEQ ID NO: 226 - DNA, 121 bp, Homo sapiens
gttttctgggaagggacagaagatgacaggggccaggagggggctggtgcaggggccgccggtgtaggagctgctggtgcaggggccacgcggggagcagcctctggcattctgggagctt

SEQ ID NO: 227 - DNA, 17 bp, Homo sapiens
tcctacaccggcggccc

SEQ ID NO: 228 - DNA, 17 bp, Homo sapiens
gggccgccggtgtagga

SEQ ID NO: 229 - DNA, 121 bp, Homo sapiens
ttcaactctgtctccttcctcttcctacagtactcccctgccctcaacaagatgttttgccaactggccaagacctgccctgtgcagctgtgggttgattccacacccccgcccggcaccc

SEQ ID NO: 230 - DNA, 121 bp, Homo sapiens
gggtgccgggcgggggtgtggaatcaacccacagctgcacagggcaggtcttggccagttggcaaaacatcttgttgagggcaggggagtactgtaggaagaggaaggagacagagttgaa

SEQ ID NO: 231 - DNA, 17 bp, Homo sapiens
tgttttgccaactggcc

SEQ ID NO: 232 - DNA, 17 bp, Homo sapiens
ggccagttggcaaaaca

SEQ ID NO: 233 - DNA, 121 bp, Homo sapiens
tcctcttcctacagtactcccctgccctcaacaagatgttttgccaactggccaagacctgccctgtgcagctgtgggttgattccacacccccgcccggcacccgcgtccgcgccatggc

SEQ ID NO: 234 - DNA, 121 bp, Homo sapiens
gccatggcgcggacgcgggtgccgggcgggggtgtggaatcaacccacagctgcacagggcaggtcttggccagttggcaaaacatcttgttgagggcaggggagtactgtaggaagagga

SEQ ID NO: 235 - DNA, 17 bp, Homo sapiens
caagacctgccctgtgc

SEQ ID NO: 236 - DNA, 17 bp, Homo sapiens
gcacagggcaggtcttg

SEQ ID NO: 237 - DNA, 121 bp, Homo sapiens
aacaagatgttttgccaactggccaagacctgccctgtgcagctgtgggttgattccacacccccgcccggcacccgcgtccgcgccatggccatctacaagcagtcacagcacatgacgg

SEQ ID NO: 238 - DNA, 121 bp, Homo sapiens
ccgtcatgtgctgtgactgcttgtagatggccatggcgcggacgcgggtgccgggcgggggtgtggaatcaacccacagctgcacagggcaggtcttggccagttggcaaaacatcttgtt

SEQ ID NO: 239 - DNA, 17 bp, Homo sapiens
attccacacccccgccc

SEQ ID NO: 240 - DNA, 17 bp, Homo sapiens
gggcgggggtgtggaat

SEQ ID NO: 241 - DNA, 121 bp, Homo sapiens
agatgttttgccaactggccaagacctgccctgtgcagctgtgggttgattccacacccccgcccggcacccgcgtccgcgccatggccatctacaagcagtcacagcacatgacggaggt

SEQ ID NO: 242 - DNA, 121 bp, Homo sapiens
acctccgtcatgtgctgtgactgcttgtagatggccatggcgcggacgcgggtgccgggcgggggtgtggaatcaacccacagctgcacagggcaggtcttggccagttggcaaaacatct

SEQ ID NO: 243 - DNA, 17 bp, Homo sapiens
cacacccccgcccggca

SEQ ID NO: 244 - DNA, 17 bp, Homo sapiens
tgccgggcgggggtgtg

SEQ ID NO: 245 - DNA, 121 bp, Homo sapiens
tttgccaactggccaagacctgccctgtgcagctgtgggttgattccacacccccgcccggcacccgcgtccgcgccatggccatctacaagcagtcacagcacatgacggaggttgtgag

SEQ ID NO: 246 - DNA, 121 bp, Homo sapiens
ctcacaacctccgtcatgtgctgtgactgcttgtagatggccatggcgcggacgcgggtgccgggcgggggtgtggaatcaacccacagctgcacagggcaggtcttggccagttggcaaa

SEQ ID NO: 247 - DNA, 17 bp, Homo sapiens
cccgcccggcacccgcg

SEQ ID NO: 248 - DNA, 17 bp, Homo sapiens
cgcgggtgccgggcggg

SEQ ID NO: 249 - DNA, 121 bp, Homo sapiens
cccgcgtccgcgccatggccatctacaagcagtcacagcacatgacggaggttgtgaggcgctgcccccaccatgagcgctgctcagatagcgatggtgagcagctggggctggagagacg

SEQ ID NO: 250 - DNA, 121 bp, Homo sapiens
cgtctctccagccccagctgctcaccatcgctatctgagcagcgctcatggtgggggcagcgcctcacaacctccgtcatgtgctgtgactgcttgtagatggccatggcgcggacgcggg

SEQ ID NO: 251 - DNA, 17 bp, Homo sapiens
tgtgaggcgctgccccc

SEQ ID NO: 252 - DNA, 17 bp, Homo sapiens
gggggcagcgcctcaca

SEQ ID NO: 253 - DNA, 121 bp, Homo sapiens
atggccatctacaagcagtcacagcacatgacggaggttgtgaggcgctgcccccaccatgagcgctgctcagatagcgatggtgagcagctggggctggagagacgacagggctggttgc

SEQ ID NO: 254 - DNA, 121 bp, Homo sapiens
gcaaccagccctgtcgtctctccagccccagctgctcaccatcgctatctgagcagcgctcatggtgggggcagcgcctcacaacctccgtcatgtgctgtgactgcttgtagatggccat

SEQ ID NO: 255 - DNA, 17 bp, Homo sapiens
cccaccatgagcgctgc

SEQ ID NO: 256 - DNA, 17 bp, Homo sapiens
gcagcgctcatggtggg

SEQ ID NO: 257 - DNA, 121 bp, Homo sapiens
gccatctacaagcagtcacagcacatgacggaggttgtgaggcgctgcccccaccatgagcgctgctcagatagcgatggtgagcagctggggctggagagacgacagggctggttgccca

SEQ ID NO: 258 - DNA, 121 bp, Homo sapiens
tgggcaaccagccctgtcgtctctccagccccagctgctcaccatcgctatctgagcagcgctcatggtgggggcagcgcctcacaacctccgtcatgtgctgtgactgcttgtagatggc

SEQ ID NO: 259 - DNA, 17 bp, Homo sapiens
accatgagcgctgctca

SEQ ID NO: 260 - DNA, 17 bp, Homo sapiens
tgagcagcgctcatggt

SEQ ID NO: 261 - DNA, 121 bp, Homo sapiens
ccatctacaagcagtcacagcacatgacggaggttgtgaggcgctgcccccaccatgagcgctgctcagatagcgatggtgagcagctggggctggagagacgacagggctggttgcccag

SEQ ID NO: 262 - DNA, 121 bp, Homo sapiens
ctgggcaaccagccctgtcgtctctccagccccagctgctcaccatcgctatctgagcagcgctcatggtgggggcagcgcctcacaacctccgtcatgtgctgtgactgcttgtagatgg

SEQ ID NO: 263 - DNA, 17 bp, Homo sapiens
ccatgagcgctgctcag

SEQ ID NO: 264 - DNA, 17 bp, Homo sapiens
ctgagcagcgctcatgg

SEQ ID NO: 265 - DNA, 121 bp, Homo sapiens
ccagggtccccaggcctctgattcctcactgattgctcttaggtctggcccctcctcagcatcttatccgagtggaaggaaatttgcgtgtggagtatttggatgacagaaacacttttcg

SEQ ID NO: 266 - DNA, 121 bp, Homo sapiens
cgaaaagtgtttctgtcatccaaatactccacacgcaaatttccttccactcggataagatgctgaggaggggccagacctaagagcaatcagtgaggaatcagaggcctggggaccctgg

SEQ ID NO: 267 - DNA, 17 bp, Homo sapiens
tcctcagcatcttatcc

SEQ ID NO: 268 - DNA, 17 bp, Homo sapiens
ggataagatgctgagga

SEQ ID NO: 269 - DNA, 121 bp, Homo sapiens
cccaggcctctgattcctcactgattgctcttaggtctggcccctcctcagcatcttatccgagtggaaggaaatttgcgtgtggagtatttggatgacagaaacacttttcgacatagtg

SEQ ID NO: 270 - DNA, 121 bp, Homo sapiens
cactatgtcgaaaagtgtttctgtcatccaaatactccacacgcaaatttccttccactcggataagatgctgaggaggggccagacctaagagcaatcagtgaggaatcagaggcctggg

SEQ ID NO: 271 - DNA, 17 bp, Homo sapiens
atcttatccgagtggaa

SEQ ID NO: 272 - DNA, 17 bp, Homo sapiens
ttccactcggataagat

SEQ ID NO: 273 - DNA, 121 bp, Homo sapiens
gcccctcctcagcatcttatccgagtggaaggaaatttgcgtgtggagtatttggatgacagaaacacttttcgacatagtgtggtggtgccctatgagccgcctgaggtctggtttgcaa

SEQ ID NO: 274 - DNA, 121 bp, Homo sapiens
ttgcaaaccagacctcaggcggctcatagggcaccaccacactatgtcgaaaagtgtttctgtcatccaaatactccacacgcaaatttccttccactcggataagatgctgaggaggggc

SEQ ID NO: 275 - DNA, 17 bp, Homo sapiens
tggatgacagaaacact

SEQ ID NO: 276 - DNA, 17 bp, Homo sapiens
agtgtttctgtcatcca

SEQ ID NO: 277 - DNA, 121 bp, Homo sapiens
catcttatccgagtggaaggaaatttgcgtgtggagtatttggatgacagaaacacttttcgacatagtgtggtggtgccctatgagccgcctgaggtctggtttgcaactggggtctctg

SEQ ID NO: 278 - DNA, 121 bp, Homo sapiens
cagagaccccagttgcaaaccagacctcaggcggctcatagggcaccaccacactatgtcgaaaagtgtttctgtcatccaaatactccacacgcaaatttccttccactcggataagatg

SEQ ID NO: 279 - DNA, 17 bp, Homo sapiens
acacttttcgacatagt

SEQ ID NO: 280 - DNA, 17 bp, Homo sapiens
actatgtcgaaaagtgt

SEQ ID NO: 281 - DNA, 121 bp, Homo sapiens
ggaaatttgcgtgtggagtatttggatgacagaaacacttttcgacatagtgtggtggtgccctatgagccgcctgaggtctggtttgcaactggggtctctgggaggaggggttaagggt

SEQ ID NO: 282 - DNA, 121 bp, Homo sapiens
acccttaacccctcctcccagagaccccagttgcaaaccagacctcaggcggctcatagggcaccaccacactatgtcgaaaagtgtttctgtcatccaaatactccacacgcaaatttcc

SEQ ID NO: 283 - DNA, 17 bp, Homo sapiens
tggtggtgccctatgag

SEQ ID NO: 284 - DNA, 17 bp, Homo sapiens
ctcatagggcaccacca

SEQ ID NO: 285 - DNA, 121 bp, Homo sapiens
atttgcgtgtggagtatttggatgacagaaacacttttcgacatagtgtggtggtgccctatgagccgcctgaggtctggtttgcaactggggtctctgggaggaggggttaagggtggtt

SEQ ID NO: 286 - DNA, 121 bp, Homo sapiens
aaccacccttaacccctcctcccagagaccccagttgcaaaccagacctcaggcggctcatagggcaccaccacactatgtcgaaaagtgtttctgtcatccaaatactccacacgcaaat

SEQ ID NO: 287 - DNA, 17 bp, Homo sapiens
ggtgccctatgagccgc

SEQ ID NO: 288 - DNA, 17 bp, Homo sapiens
gcggctcatagggcacc

SEQ ID NO: 289 - DNA, 121 bp, Homo sapiens
cacaggtctccccaaggcgcactggcctcatcttgggcctgtgttatctcctaggttggctctgactgtaccaccatccactacaactacatgtgtaacagttcctgcatgggcggcatga

SEQ ID NO: 290 - DNA, 121 bp, Homo sapiens
tcatgccgcccatgcaggaactgttacacatgtagttgtagtggatggtggtacagtcagagccaacctaggagataacacaggcccaagatgaggccagtgcgccttggggagacctgtg

SEQ ID NO: 291 - DNA, 17 bp, Homo sapiens
aggttggctctgactgt

SEQ ID NO: 292 - DNA, 17 bp, Homo sapiens
acagtcagagccaacct

SEQ ID NO: 293 - DNA, 121 bp, Homo sapiens
gcactggcctcatcttgggcctgtgttatctcctaggttggctctgactgtaccaccatccactacaactacatgtgtaacagttcctgcatgggcggcatgaaccggaggcccatcctca

SEQ ID NO: 294 - DNA, 121 bp, Homo sapiens
tgaggatgggcctccggttcatgccgcccatgcaggaactgttacacatgtagttgtagtggatggtggtacagtcagagccaacctaggagataacacaggcccaagatgaggccagtgc

SEQ ID NO: 295 - DNA, 17 bp, Homo sapiens
ccaccatccactacaac

SEQ ID NO: 296 - DNA, 17 bp, Homo sapiens
gttgtagtggatggtgg

SEQ ID NO: 297 - DNA, 121 bp, Homo sapiens
gcctcatcttgggcctgtgttatctcctaggttggctctgactgtaccaccatccactacaactacatgtgtaacagttcctgcatgggcggcatgaaccggaggcccatcctcaccatca

SEQ ID NO: 298 - DNA, 121 bp, Homo sapiens
tgatggtgaggatgggcctccggttcatgccgcccatgcaggaactgttacacatgtagttgtagtggatggtggtacagtcagagccaacctaggagataacacaggcccaagatgaggc

SEQ ID NO: 299 - DNA, 17 bp, Homo sapiens
tccactacaactacatg

SEQ ID NO: 300 - DNA, 17 bp, Homo sapiens
catgtagttgtagtgga

SEQ ID NO: 301 - DNA, 121 bp, Homo sapiens
cctcatcttgggcctgtgttatctcctaggttggctctgactgtaccaccatccactacaactacatgtgtaacagttcctgcatgggcggcatgaaccggaggcccatcctcaccatcat

SEQ ID NO: 302 - DNA, 121 bp, Homo sapiens
atgatggtgaggatgggcctccggttcatgccgcccatgcaggaactgttacacatgtagttgtagtggatggtggtacagtcagagccaacctaggagataacacaggcccaagatgagg

SEQ ID NO: 303 - DNA, 17 bp, Homo sapiens
ccactacaactacatgt

SEQ ID NO: 304 - DNA, 17 bp, Homo sapiens
acatgtagttgtagtgg

SEQ ID NO: 305 - DNA, 121 bp, Homo sapiens
catccactacaactacatgtgtaacagttcctgcatgggcggcatgaaccggaggcccatcctcaccatcatcacactggaagactccaggtcaggagccacttgccaccctgcacactgg

SEQ ID NO: 306 - DNA, 121 bp, Homo sapiens
ccagtgtgcagggtggcaagtggctcctgacctggagtcttccagtgtgatgatggtgaggatgggcctccggttcatgccgcccatgcaggaactgttacacatgtagttgtagtggatg

SEQ ID NO: 307 - DNA, 17 bp, Homo sapiens
aggcccatcctcaccat

SEQ ID NO: 308 - DNA, 17 bp, Homo sapiens
atggtgaggatgggcct

SEQ ID NO: 309 - DNA, 121 bp, Homo sapiens
acatgtgtaacagttcctgcatgggcggcatgaaccggaggcccatcctcaccatcatcacactggaagactccaggtcaggagccacttgccaccctgcacactggcctgctgtgcccca

SEQ ID NO: 310 - DNA, 121 bp, Homo sapiens
tggggcacagcaggccagtgtgcagggtggcaagtggctcctgacctggagtcttccagtgtgatgatggtgaggatgggcctccggttcatgccgcccatgcaggaactgttacacatgt

SEQ ID NO: 311 - DNA, 17 bp, Homo sapiens
catcatcacactggaag

SEQ ID NO: 312 - DNA, 17 bp, Homo sapiens
cttccagtgtgatgatg

SEQ ID NO: 313 - DNA, 121 bp, Homo sapiens
tgtgtaacagttcctgcatgggcggcatgaaccggaggcccatcctcaccatcatcacactggaagactccaggtcaggagccacttgccaccctgcacactggcctgctgtgccccagcc

SEQ ID NO: 314 - DNA, 121 bp, Homo sapiens
ggctggggcacagcaggccagtgtgcagggtggcaagtggctcctgacctggagtcttccagtgtgatgatggtgaggatgggcctccggttcatgccgcccatgcaggaactgttacaca

SEQ ID NO: 315 - DNA, 17 bp, Homo sapiens
catcacactggaagact

SEQ ID NO: 316 - DNA, 17 bp, Homo sapiens
agtcttccagtgtgatg

SEQ ID NO: 317 - DNA, 121 bp, Homo sapiens
gacctgatttccttactgcctcttgcttctcttttcctatcctgagtagtggtaatctactgggacggaacagctttgaggtgcgtgtttgtgcctgtcctgggagagaccggcgcacaga

SEQ ID NO: 318 - DNA, 121 bp, Homo sapiens
tctgtgcgccggtctctcccaggacaggcacaaacacgcacctcaaagctgttccgtcccagtagattaccactactcaggataggaaaagagaagcaagaggcagtaaggaaatcaggtc

SEQ ID NO: 319 - DNA, 17 bp, Homo sapiens
taatctactgggacgga

SEQ ID NO: 320 - DNA, 17 bp, Homo sapiens
tccgtcccagtagatta

SEQ ID NO: 321 - DNA, 121 bp, Homo sapiens
tgcttctcttttcctatcctgagtagtggtaatctactgggacggaacagctttgaggtgcgtgtttgtgcctgtcctgggagagaccggcgcacagaggaagagaatctccgcaagaaag

SEQ ID NO: 322 - DNA, 121 bp, Homo sapiens
ctttcttgcggagattctcttcctctgtgcgccggtctctcccaggacaggcacaaacacgcacctcaaagctgttccgtcccagtagattaccactactcaggataggaaaagagaagca

SEQ ID NO: 323 - DNA, 17 bp, Homo sapiens
ttgaggtgcgtgtttgt

SEQ ID NO: 324 - DNA, 17 bp, Homo sapiens
acaaacacgcacctcaa

SEQ ID NO: 325 - DNA, 121 bp, Homo sapiens
cttttcctatcctgagtagtggtaatctactgggacggaacagctttgaggtgcgtgtttgtgcctgtcctgggagagaccggcgcacagaggaagagaatctccgcaagaaaggggagcc

SEQ ID NO: 326 - DNA, 121 bp, Homo sapiens
ggctcccctttcttgcggagattctcttcctctgtgcgccggtctctcccaggacaggcacaaacacgcacctcaaagctgttccgtcccagtagattaccactactcaggataggaaaag

SEQ ID NO: 327 - DNA, 17 bp, Homo sapiens
gcgtgtttgtgcctgtc

SEQ ID NO: 328 - DNA, 17 bp, Homo sapiens
gacaggcacaaacacgc

SEQ ID NO: 329 - DNA, 121 bp, Homo sapiens
tcctgagtagtggtaatctactgggacggaacagctttgaggtgcgtgtttgtgcctgtcctgggagagaccggcgcacagaggaagagaatctccgcaagaaaggggagcctcaccacga

SEQ ID NO: 330 - DNA, 121 bp, Homo sapiens
tcgtggtgaggctcccctttcttgcggagattctcttcctctgtgcgccggtctctcccaggacaggcacaaacacgcacctcaaagctgttccgtcccagtagattaccactactcagga

SEQ ID NO: 331 - DNA, 17 bp, Homo sapiens
tgcctgtcctgggagag

SEQ ID NO: 332 - DNA, 17 bp, Homo sapiens
ctctcccaggacaggca

SEQ ID NO: 333 - DNA, 121 bp, Homo sapiens
gtagtggtaatctactgggacggaacagctttgaggtgcgtgtttgtgcctgtcctgggagagaccggcgcacagaggaagagaatctccgcaagaaaggggagcctcaccacgagctgcc

SEQ ID NO: 334 - DNA, 121 bp, Homo sapiens
ggcagctcgtggtgaggctcccctttcttgcggagattctcttcctctgtgcgccggtctctcccaggacaggcacaaacacgcacctcaaagctgttccgtcccagtagattaccactac

SEQ ID NO: 335 - DNA, 17 bp, Homo sapiens
tcctgggagagaccggc

SEQ ID NO: 336 - DNA, 17 bp, Homo sapiens
gccggtctctcccagga

SEQ ID NO: 337 - DNA, 121 bp, Homo sapiens
ggaacagctttgaggtgcgtgtttgtgcctgtcctgggagagaccggcgcacagaggaagagaatctccgcaagaaaggggagcctcaccacgagctgcccccagggagcactaagcgagg

SEQ ID NO: 338 - DNA, 121 bp, Homo sapiens
cctcgcttagtgctccctgggggcagctcgtggtgaggctcccctttcttgcggagattctcttcctctgtgcgccggtctctcccaggacaggcacaaacacgcacctcaaagctgttcc

SEQ ID NO: 339 - DNA, 17 bp, Homo sapiens
agaggaagagaatctcc

SEQ ID NO: 340 - DNA, 17 bp, Homo sapiens
ggagattctcttcctct

SEQ ID NO: 341 - DNA, 121 bp, Homo sapiens
aagagaatctccgcaagaaaggggagcctcaccacgagctgcccccagggagcactaagcgaggtaagcaagcaggacaagaagcggtggaggagaccaagggtgcagttatgcctcagat

SEQ ID NO: 342 - DNA, 121 bp, Homo sapiens
atctgaggcataactgcacccttggtctcctccaccgcttcttgtcctgcttgcttacctcgcttagtgctccctgggggcagctcgtggtgaggctcccctttcttgcggagattctctt

SEQ ID NO: 343 - DNA, 17 bp, Homo sapiens
cactaagcgaggtaagc

SEQ ID NO: 344 - DNA, 17 bp, Homo sapiens
gcttacctcgcttagtg

SEQ ID NO: 345 - DNA, 121 bp, Homo sapiens
gaagagaatctccgcaagaaaggggagcctcaccacgagctgcccccagggagcactaagcgaggtaagcaagcaggacaagaagcggtggaggagaccaagggtgcagttatgcctcaga

SEQ ID NO: 346 - DNA, 121 bp, Homo sapiens
tctgaggcataactgcacccttggtctcctccaccgcttcttgtcctgcttgcttacctcgcttagtgctccctgggggcagctcgtggtgaggctcccctttcttgcggagattctcttc

SEQ ID NO: 347 - DNA, 17 bp, Homo sapiens
gcactaagcgaggtaag

SEQ ID NO: 348 - DNA, 17 bp, Homo sapiens
cttacctcgcttagtgc

SEQ ID NO: 349 - DNA, 121 bp, Homo sapiens
ggtactgtgaatatacttacttctccccctcctctgttgctgcagatccgtgggcgtgagcgcttcgagatgttccgagagctgaatgaggccttggaactcaaggatgcccaggctggga

SEQ ID NO: 350 - DNA, 121 bp, Homo sapiens
tcccagcctgggcatccttgagttccaaggcctcattcagctctcggaacatctcgaagcgctcacgcccacggatctgcagcaacagaggagggggagaagtaagtatattcacagtacc

SEQ ID NO: 351 - DNA, 17 bp, Homo sapiens
ggcgtgagcgcttcgag

SEQ ID NO: 352 - DNA, 17 bp, Homo sapiens
ctcgaagcgctcacgcc

SEQ ID NO: 353 - DNA, 121 bp, Homo sapiens
ctccccctcctctgttgctgcagatccgtgggcgtgagcgcttcgagatgttccgagagctgaatgaggccttggaactcaaggatgcccaggctgggaaggagccaggggggagcagggc

SEQ ID NO: 354 - DNA, 121 bp, Homo sapiens
gccctgctcccccctggctccttcccagcctgggcatccttgagttccaaggcctcattcagctctcggaacatctcgaagcgctcacgcccacggatctgcagcaacagaggagggggag

SEQ ID NO: 355 - DNA, 17 bp, Homo sapiens
ccgagagctgaatgagg

SEQ ID NO: 356 - DNA, 17 bp, Homo sapiens
cctcattcagctctcgg

SEQ ID NO: 357 - DNA, 121 bp, Homo sapiens
tctgacacaactgtgttcactagcaacctcaaacagacaccatggtgcacctgactcctgaggagaagtctgccgttactgccctgtggggcaaggtgaacgtggatgaagttggtggtga

SEQ ID NO: 358 - DNA, 121 bp, Homo sapiens
tcaccaccaacttcatccacgttcaccttgccccacagggcagtaacggcagacttctcctcaggagtcaggtgcaccatggtgtctgtttgaggttgctagtgaacacagttgtgtcaga

SEQ ID NO: 359 - DNA, 17 bp, Homo sapiens
gactcctgaggagaagt

SEQ ID NO: 360 - DNA, 17 bp, Homo sapiens
acttctcctcaggagtc

SEQ ID NO: 361 - DNA, 121 bp, Homo sapiens
ctattgcttacatttgcttctgacacaactgtgttcactagcaacctcaaacagacaccatggtgcacctgactcctgaggagaagtctgccgttactgccctgtggggcaaggtgaacgt

SEQ ID NO: 362 - DNA, 121 bp, Homo sapiens
acgttcaccttgccccacagggcagtaacggcagacttctcctcaggagtcaggtgcaccatggtgtctgtttgaggttgctagtgaacacagttgtgtcagaagcaaatgtaagcaatag

SEQ ID NO: 363 - DNA, 17 bp, Homo sapiens
agacaccatggtgcacc

SEQ ID NO: 364 - DNA, 17 bp, Homo sapiens
ggtgcaccatggtgtct

SEQ ID NO: 365 - DNA, 121 bp, Homo sapiens
tattgcttacatttgcttctgacacaactgtgttcactagcaacctcaaacagacaccatggtgcacctgactcctgaggagaagtctgccgttactgccctgtggggcaaggtgaacgtg

SEQ ID NO: 366 - DNA, 121 bp, Homo sapiens
cacgttcaccttgccccacagggcagtaacggcagacttctcctcaggagtcaggtgcaccatggtgtctgtttgaggttgctagtgaacacagttgtgtcagaagcaaatgtaagcaata

SEQ ID NO: 367 - DNA, 17 bp, Homo sapiens
gacaccatggtgcacct

SEQ ID NO: 368 - DNA, 17 bp, Homo sapiens
aggtgcaccatggtgtc

SEQ ID NO: 369 - DNA, 121 bp, Homo sapiens; identical to SEQ ID NO: 365

SEQ ID NO: 370 - DNA, 121 bp, Homo sapiens; identical to SEQ ID NO: 366

SEQ ID NO: 371 - DNA, 17 bp, Homo sapiens
gacaccatggtgcacct

SEQ ID NO: 372 - DNA, 17 bp, Homo sapiens
aggtgcaccatggtgtc

SEQ ID NO: 373 - DNA, 121 bp, Homo sapiens; identical to SEQ ID NO: 361

SEQ ID NO: 374 - DNA, 121 bp, Homo sapiens; identical to SEQ ID NO: 362

SEQ ID NO: 375 - DNA, 17 bp, Homo sapiens
agacaccatggtgcacc

SEQ ID NO: 376 - DNA, 17 bp, Homo sapiens
ggtgcaccatggtgtct

SEQ ID NO: 377 - DNA, 121 bp, Homo sapiens; identical to SEQ ID NO: 361

SEQ ID NO: 378 - DNA, 121 bp, Homo sapiens; identical to SEQ ID NO: 362

SEQ ID NO: 379 - DNA, 17 bp, Homo sapiens
agacaccatggtgcacc

SEQ ID NO: 380 - DNA, 17 bp, Homo sapiens
ggtgcaccatggtgtct

SEQ ID NO: 381 - DNA, 121 bp, Homo sapiens
tctattgcttacatttgcttctgacacaactgtgttcactagcaacctcaaacagacaccatggtgcacctgactcctgaggagaagtctgccgttactgccctgtggggcaaggtgaacg

SEQ ID NO: 382 - DNA, 121 bp, Homo sapiens
cgttcaccttgccccacagggcagtaacggcagacttctcctcaggagtcaggtgcaccatggtgtctgtttgaggttgctagtgaacacagttgtgtcagaagcaaatgtaagcaataga

SEQ ID NO: 383 - DNA, 17 bp, Homo sapiens
cagacaccatggtgcac

SEQ ID NO: 384 - DNA, 17 bp, Homo sapiens
gtgcaccatggtgtctg

SEQ ID NO: 385 - DNA, 121 bp, Homo sapiens
tcaaacagacaccatggtgcacctgactcctgaggagaagtctgccgttactgccctgtggggcaaggtgaacgtggatgaagttggtggtgaggccctgggcaggttggtatcaaggtta

SEQ ID NO: 386 - DNA, 121 bp, Homo sapiens
taaccttgataccaacctgcccagggcctcaccaccaacttcatccacgttcaccttgccccacagggcagtaacggcagacttctcctcaggagtcaggtgcaccatggtgtctgtttga

SEQ ID NO: 387 - DNA, 17 bp, Homo sapiens
gccctgtggggcaaggt

SEQ ID NO: 388 - DNA, 17 bp, Homo sapiens
accttgccccacagggc

SEQ ID NO: 389 - DNA, 121 bp, Homo sapiens
ctcaaacagacaccatggtgcacctgactcctgaggagaagtctgccgttactgccctgtggggcaaggtgaacgtggatgaagttggtggtgaggccctgggcaggttggtatcaaggtt

SEQ ID NO: 390 - DNA, 121 bp, Homo sapiens
aaccttgataccaacctgcccagggcctcaccaccaacttcatccacgttcaccttgccccacagggcagtaacggcagacttctcctcaggagtcaggtgcaccatggtgtctgtttgag

SEQ ID NO: 391 - DNA, 17 bp, Homo sapiens
tgccctgtggggcaagg

SEQ ID NO: 392 - DNA, 17 bp, Homo sapiens
ccttgccccacagggca

SEQ ID NO: 393 - DNA, 121 bp, Homo sapiens
acagacaccatggtgcacctgactcctgaggagaagtctgccgttactgccctgtggggcaaggtgaacgtggatgaagttggtggtgaggccctgggcaggttggtatcaaggttacaag

SEQ ID NO: 394 - DNA, 121 bp, Homo sapiens
cttgtaaccttgataccaacctgcccagggcctcaccaccaacttcatccacgttcaccttgccccacagggcagtaacggcagacttctcctcaggagtcaggtgcaccatggtgtctgt

SEQ ID NO: 395 - DNA, 17 bp, Homo sapiens
tgtggggcaaggtgaac

SEQ ID NO: 396 - DNA, 17 bp, Homo sapiens
gttcaccttgccccaca

SEQ ID NO: 397 - DNA, 121 bp, Homo sapiens
ccatggtgcacctgactcctgaggagaagtctgccgttactgccctgtggggcaaggtgaacgtggatgaagttggtggtgaggccctgggcaggttggtatcaaggttacaagacaggtt

SEQ ID NO: 398 - DNA, 121 bp, Homo sapiens
aacctgtcttgtaaccttgataccaacctgcccagggcctcaccaccaacttcatccacgttcaccttgccccacagggcagtaacggcagacttctcctcaggagtcaggtgcaccatgg

SEQ ID NO: 399 - DNA, 17 bp, Homo sapiens
caaggtgaacgtggatg

SEQ ID NO: 400 - DNA, 17 bp, Homo sapiens
catccacgttcaccttg

SEQ ID NO: 401 - DNA, 121 bp, Homo sapiens
acctgactcctgaggagaagtctgccgttactgccctgtggggcaaggtgaacgtggatgaagttggtggtgaggccctgggcaggttggtatcaaggttacaagacaggtttaaggagac

SEQ ID NO: 402 - DNA, 121 bp, Homo sapiens
gtctccttaaacctgtcttgtaaccttgataccaacctgcccagggcctcaccaccaacttcatccacgttcaccttgccccacagggcagtaacggcagacttctcctcaggagtcaggt

SEQ ID NO: 403 - DNA, 17 bp, Homo sapiens
cgtggatgaagttggtg

SEQ ID NO: 404 - DNA, 17 bp, Homo sapiens
caccaacttcatccacg

SEQ ID NO: 405 - DNA, 121 bp, Homo sapiens
cacctgactcctgaggagaagtctgccgttactgccctgtggggcaaggtgaacgtggatgaagttggtggtgaggccctgggcaggttggtatcaaggttacaagacaggtttaaggaga

SEQ ID NO: 406 - DNA, 121 bp, Homo sapiens
tctccttaaacctgtcttgtaaccttgataccaacctgcccagggcctcaccaccaacttcatccacgttcaccttgccccacagggcagtaacggcagacttctcctcaggagtcaggtg

SEQ ID NO: 407 - DNA, 17 bp, Homo sapiens
acgtggatgaagttggt

SEQ ID NO: 408 - DNA, 17 bp, Homo sapiens
accaacttcatccacgt

SEQ ID NO: 409 - DNA, 121 bp, Homo sapiens
gaggagaagactgctgtcaatgccctgtggggcaaagtgaacgtggatgcagttggtggtgaggccctgggcaggttggtatcaaggttataagagaggctcaaggaggcaaatggaaact

SEQ ID NO: 410 - DNA, 121 bp, Homo sapiens
agtttccatttgcctccttgagcctctcttataaccttgataccaacctgcccagggcctcaccaccaactgcatccacgttcactttgccccacagggcattgacagcagtcttctcctc

SEQ ID NO: 411 - DNA, 17 bp, Homo sapiens
ttggtggtgaggccctg

SEQ ID NO: 412 - DNA, 17 bp, Homo sapiens
cagggcctcaccaccaa

SEQ ID NO: 413 - DNA, 121 bp, Homo sapiens; identical to SEQ ID NO: 409

SEQ ID NO: 414 - DNA, 121 bp, Homo sapiens; identical to SEQ ID NO: 410

SEQ ID NO: 415 - DNA, 17 bp, Homo sapiens
ttggtggtgaggccctg

SEQ ID NO: 416 - DNA, 17 bp, Homo sapiens
cagggcctcaccaccaa

SEQ ID NO: 417 - DNA, 121 bp, Homo sapiens
gagaagactgctgtcaatgccctgtggggcaaagtgaacgtggatgcagttggtggtgaggccctgggcaggttggtatcaaggttataagagaggctcaaggaggcaaatggaaactggg

SEQ ID NO: 418 - DNA, 121 bp, Homo sapiens
cccagtttccatttgcctccttgagcctctcttataaccttgataccaacctgcccagggcctcaccaccaactgcatccacgttcactttgccccacagggcattgacagcagtcttctc

SEQ ID NO: 419 - DNA, 17 bp, Homo sapiens
gtggtgaggccctgggc

SEQ ID NO: 420 - DNA, 17 bp, Homo sapiens
gcccagggcctcaccac

SEQ ID NO: 421 - DNA, 121 bp, Homo sapiens
ctgtcaatgccctgtggggcaaagtgaacgtggatgcagttggtggtgaggccctgggcaggttggtatcaaggttataagagaggctcaaggaggcaaatggaaactgggcatgtgtaga

SEQ ID NO: 422 - DNA, 121 bp, Homo sapiens
tctacacatgcccagtttccatttgcctccttgagcctctcttataaccttgataccaacctgcccagggcctcaccaccaactgcatccacgttcactttgccccacagggcattgacag

SEQ ID NO: 423 - DNA, 17 bp, Homo sapiens
cctgggcaggttggtat

SEQ ID NO: 424 - DNA, 17 bp, Homo sapiens
ataccaacctgcccagg

SEQ ID NO: 425 - DNA, 121 bp, Homo sapiens
tgggtttctgataggcactgactctctgtcccttgggctgttttcctaccctcagattactggtggtctacccttggacccagaggttctttgagtcctttggggatctgtcctctcctga

SEQ ID NO: 426 - DNA, 121 bp, Homo sapiens
tcaggagaggacagatccccaaaggactcaaagaacctctgggtccaagggtagaccaccagtaatctgagggtaggaaaacagcccaagggacagagagtcagtgcctatcagaaaccca

SEQ ID NO: 427 - DNA, 17 bp, Homo sapiens
cagattactggtggtct

SEQ ID NO: 428 - DNA, 17 bp, Homo sapiens
agaccaccagtaatctg

SEQ ID NO: 429 - DNA, 121 bp, Homo sapiens
ataggcactgactctctgtcccttgggctgttttcctaccctcagattactggtggtctacccttggacccagaggttctttgagtcctttggggatctgtcctctcctgatgctgttatg

SEQ ID NO: 430 - DNA, 121 bp, Homo sapiens
cataacagcatcaggagaggacagatccccaaaggactcaaagaacctctgggtccaagggtagaccaccagtaatctgagggtaggaaaacagcccaagggacagagagtcagtgcctat

SEQ ID NO: 431 - DNA, 17 bp, Homo sapiens
gtggtctacccttggac

SEQ ID NO: 432 - DNA, 17 bp, Homo sapiens
gtccaagggtagaccac

SEQ ID NO: 433 - DNA, 121 bp, Homo sapiens
actgactctctgtcccttgggctgttttcctaccctcagattactggtggtctacccttggacccagaggttctttgagtcctttggggatctgtcctctcctgatgctgttatgggcaac

SEQ ID NO: 434 - DNA, 121 bp, Homo sapiens
gttgcccataacagcatcaggagaggacagatccccaaaggactcaaagaacctctgggtccaagggtagaccaccagtaatctgagggtaggaaaacagcccaagggacagagagtcagt

SEQ ID NO: 435 - DNA, 17 bp, Homo sapiens
tacccttggacccagag

SEQ ID NO: 436 - DNA, 17 bp, Homo sapiens
ctctgggtccaagggta

SEQ ID NO: 437 - DNA, 121 bp, Homo sapiens
cactgactctctgtcccttgggctgttttcctaccctcagattactggtggtctacccttggacccagaggttctttgagtcctttggggatctgtcctctcctgatgctgttatgggcaa

SEQ ID NO: 438 - DNA, 121 bp, Homo sapiens
ttgcccataacagcatcaggagaggacagatccccaaaggactcaaagaacctctgggtccaagggtagaccaccagtaatctgagggtaggaaaacagcccaagggacagagagtcagtg

SEQ ID NO: 439 - DNA, 17 bp, Homo sapiens
ctacccttggacccaga

SEQ ID NO: 440 - DNA, 17 bp, Homo sapiens
tctgggtccaagggtag

SEQ ID NO: 441 - DNA, 121 bp, Homo sapiens
actctctgtcccttgggctgttttcctaccctcagattactggtggtctacccttggacccagaggttctttgagtcctttggggatctgtcctctcctgatgctgttatgggcaacccta

SEQ ID NO: 442 - DNA, 121 bp, Homo sapiens
tagggttgcccataacagcatcaggagaggacagatccccaaaggactcaaagaacctctgggtccaagggtagaccaccagtaatctgagggtaggaaaacagcccaagggacagagagt

SEQ ID NO: 443 - DNA, 17 bp, Homo sapiens
cttggacccagaggttc

SEQ ID NO: 444 - DNA, 17 bp, Homo sapiens
gaacctctgggtccaag

SEQ ID NO: 445 - DNA, 121 bp, Homo sapiens
ttgggctgttttcctaccctcagattactggtggtctacccttggacccagaggttctttgagtcctttggggatctgtcctctcctgatgctgttatgggcaaccctaaggtgaaggctc

SEQ ID NO: 446 - DNA, 121 bp, Homo sapiens
gagccttcaccttagggttgcccataacagcatcaggagaggacagatccccaaaggactcaaagaacctctgggtccaagggtagaccaccagtaatctgagggtaggaaaacagcccaa

SEQ ID NO: 447 - DNA, 17 bp, Homo sapiens
ggttctttgagtccttt

SEQ ID NO: 448 - DNA, 17 bp, Homo sapiens
aaaggactcaaagaacc

SEQ ID NO: 449 - DNA, 121 bp, Homo sapiens
ttctttgagtcctttggggatctgtcctctcctgatgctgttatgggcaaccctaaggtgaaggctcatggcaagaaggtgctaggtgcctttagtgatggcctggctcacctggacaacc

SEQ ID NO: 450 - DNA, 121 bp, Homo sapiens
ggttgtccaggtgagccaggccatcactaaaggcacctagcaccttcttgccatgagccttcaccttagggttgcccataacagcatcaggagaggacagatccccaaaggactcaaagaa

SEQ ID NO: 451 - DNA, 17 bp, Homo sapiens
ctaaggtgaaggctcat

SEQ ID NO: 452 - DNA, 17 bp, Homo sapiens
atgagccttcaccttag

SEQ ID NO: 453 - DNA, 121 bp, Homo sapiens
tgctgttatgggcaaccctaaggtgaaggctcatggcaagaaggtgctaggtgcctttagtgatggcctggctcacctggacaacctcaagggcactttttctcagctgagtgagctgcac

SEQ ID NO: 454 - DNA, 121 bp, Homo sapiens
gtgcagctcactcagctgagaaaaagtgcccttgaggttgtccaggtgagccaggccatcactaaaggcacctagcaccttcttgccatgagccttcaccttagggttgcccataacagca

SEQ ID NO: 455 - DNA, 17 bp, Homo sapiens
gcctttagtgatggcct

SEQ ID NO: 456 - DNA, 17 bp, Homo sapiens
aggccatcactaaaggc

SEQ ID NO: 457 - DNA, 121 bp, Homo sapiens
ttatgggcaaccctaaggtgaaggctcatggcaagaaggtgctaggtgcctttagtgatggcctggctcacctggacaacctcaagggcactttttctcagctgagtgagctgcactgtga

SEQ ID NO: 458 - DNA, 121 bp, Homo sapiens
tcacagtgcagctcactcagctgagaaaaagtgcccttgaggttgtccaggtgagccaggccatcactaaaggcacctagcaccttcttgccatgagccttcaccttagggttgcccataa

SEQ ID NO: 459 - DNA, 17 bp, Homo sapiens
tagtgatggcctggctc

SEQ ID NO: 460 - DNA, 17 bp, Homo sapiens
gagccaggccatcacta

SEQ ID NO: 461 - DNA, 121 bp, Homo sapiens
gcctttagtgatggcctggctcacctggacaacctcaagggcacctttgccacactgagtgagctgcactgtgacaagctgcacgtggatcctgagaacttcagggtgagtctatgggacc

SEQ ID NO: 462 - DNA, 121 bp, Homo sapiens
ggtcccatagactcaccctgaagttctcaggatccacgtgcagcttgtcacagtgcagctcactcagtgtggcaaaggtgcccttgaggttgtccaggtgagccaggccatcactaaaggc

SEQ ID NO: 463 - DNA, 17 bp, Homo sapiens
cactgagtgagctgcac

SEQ ID NO: 464 - DNA, 17 bp, Homo sapiens
gtgcagctcactcagtg

SEQ ID NO: 465 - DNA, 121 bp, Homo sapiens
ctggacaacctcaagggcactttttctcagctgagtgagctgcactgtgacaagctgcacgtggatcctgagaacttcagggtgagtccaggagatgcttcacttttctctttttactttc

SEQ ID NO: 466 - DNA, 121 bp, Homo sapiens
gaaagtaaaaagagaaaagtgaagcatctcctggactcaccctgaagttctcaggatccacgtgcagcttgtcacagtgcagctcactcagctgagaaaaagtgcccttgaggttgtccag

SEQ ID NO: 467 - DNA, 17 bp, Homo sapiens
agctgcacgtggatcct

SEQ ID NO: 468 - DNA, 17 bp, Homo sapiens
aggatccacgtgcagct

SEQ ID NO: 469 - DNA, 121 bp, Homo sapiens
cccttttgctaatcatgttcatacctcttatcttcctcccacagctcctgggcaacgtgctggtctgtgtgctggcccatcactttggcaaagaattcaccccaccagtgcaggctgccta

SEQ ID NO: 470 - DNA, 121 bp, Homo sapiens
taggcagcctgcactggtggggtgaattctttgccaaagtgatgggccagcacacagaccagcacgttgcccaggagctgtgggaggaagataagaggtatgaacatgattagcaaaaggg

SEQ ID NO: 471 - DNA, 17 bp, Homo sapiens
caacgtgctggtctgtg

SEQ ID NO: 472 - DNA, 17 bp, Homo sapiens
cacagaccagcacgttg

SEQ ID NO: 473 - DNA, 121 bp, Homo sapiens
gctaatcatgttcatacctcttatcttcctcccacagctcctgggcaacgtgctggtctgtgtgctggcccatcactttggcaaagaattcaccccaccagtgcaggctgcctatcagaaa

SEQ ID NO: 474 - DNA, 121 bp, Homo sapiens
tttctgataggcagcctgcactggtggggtgaattctttgccaaagtgatgggccagcacacagaccagcacgttgcccaggagctgtgggaggaagataagaggtatgaacatgattagc

SEQ ID NO: 475 - DNA, 17 bp, Homo sapiens
ctggtctgtgtgctggc

SEQ ID NO: 476 - DNA, 17 bp, Homo sapiens
gccagcacacagaccag

SEQ ID NO: 477 - DNA, 121 bp, Homo sapiens
tcatgttcatacctcttatcttcctcccacagctcctgggcaacgtgctggtctgtgtgctggcccatcactttggcaaagaattcaccccaccagtgcaggctgcctatcagaaagtggt

SEQ ID NO: 478 - DNA, 121 bp, Homo sapiens
accactttctgataggcagcctgcactggtggggtgaattctttgccaaagtgatgggccagcacacagaccagcacgttgcccaggagctgtgggaggaagataagaggtatgaacatga

SEQ ID NO: 479 - DNA, 17 bp, Homo sapiens
ctgtgtgctggcccatc

SEQ ID NO: 480 - DNA, 17 bp, Homo sapiens
gatgggccagcacacag

SEQ ID NO: 481 - DNA, 121 bp, Homo sapiens
tgttcatacctcttatcttcctcccacagctcctgggcaacgtgctggtctgtgtgctggcccatcactttggcaaagaattcaccccaccagtgcaggctgcctatcagaaagtggtggc

SEQ ID NO: 482 - DNA, 121 bp, Homo sapiens
gccaccactttctgataggcagcctgcactggtggggtgaattctttgccaaagtgatgggccagcacacagaccagcacgttgcccaggagctgtgggaggaagataagaggtatgaaca

SEQ ID NO: 483 - DNA, 17 bp, Homo sapiens
tgtgctggcccatcact

SEQ ID NO: 484 - DNA, 17 bp, Homo sapiens
agtgatgggccagcaca

SEQ ID NO: 485 - DNA, 121 bp, Homo sapiens
ttcctcccacagctcctgggcaacgtgctggtctgtgtgctggcccatcactttggcaaagaattcaccccaccagtgcaggctgcctatcagaaagtggtggctggtgtggctaatgccc

SEQ ID NO: 486 - DNA, 121 bp, Homo sapiens
gggcattagccacaccagccaccactttctgataggcagcctgcactggtggggtgaattctttgccaaagtgatgggccagcacacagaccagcacgttgcccaggagctgtgggaggaa

SEQ ID NO: 487 - DNA, 17 bp, Homo sapiens
ttggcaaagaattcacc

SEQ ID NO: 488 - DNA, 17 bp, Homo sapiens
ggtgaattctttgccaa

SEQ ID NO: 489 - DNA, 121 bp, Homo sapiens
gcaacgtgctggtctgtgtgctggcccatcactttggcaaagaattcaccccaccagtgcaggctgcctatcagaaagtggtggctggtgtggctaatgccctggcccacaagtatcacta

SEQ ID NO: 490 - DNA, 121 bp, Homo sapiens
tagtgatacttgtgggccagggcattagccacaccagccaccactttctgataggcagcctgcactggtggggtgaattctttgccaaagtgatgggccagcacacagaccagcacgttgc

SEQ ID NO: 491 - DNA, 17 bp, Homo sapiens
accagtgcaggctgcct

SEQ ID NO: 492 - DNA, 17 bp, Homo sapiens
aggcagcctgcactggt

SEQ ID NO: 493 - DNA, 121 bp, Homo sapiens
ggcaacgtgctggtctgtgtgctggcccatcactttggcaaagaattcaccccaccagtgcaggctgcctatcagaaagtggtggctggtgtggctaatgccctggcccacaagtatcact

SEQ ID NO: 494 - DNA, 121 bp, Homo sapiens
agtgatacttgtgggccagggcattagccacaccagccaccactttctgataggcagcctgcactggtggggtgaattctttgccaaagtgatgggccagcacacagaccagcacgttgcc

SEQ ID NO: 495 - DNA, 17 bp, Homo sapiens
caccagtgcaggctgcc

SEQ ID NO: 496 - DNA, 17 bp, Homo sapiens
ggcagcctgcactggtg

SEQ ID NO: 497 - DNA, 121 bp, Homo sapiens
gtctgtgtgctggcccatcactttggcaaagaattcaccccaccagtgcaggctgcctatcagaaagtggtggctggtgtggctaatgccctggcccacaagtatcactaagctcgctttc

SEQ ID NO: 498 - DNA, 121 bp, Homo sapiens
gaaagcgagcttagtgatacttgtgggccagggcattagccacaccagccaccactttctgataggcagcctgcactggtggggtgaattctttgccaaagtgatgggccagcacacagac

SEQ ID NO: 499 - DNA, 17 bp, Homo sapiens
ctgcctatcagaaagtg

SEQ ID NO: 500 - DNA, 17 bp, Homo sapiens
cactttctgataggcag

SEQ ID NO: 501 - DNA, 121 bp, Homo sapiens
aatatttgatctttattttttgttcccagggaggttatattcaaaagaaaaaggaactgtggggaatctgtatctttattgcagcagttgacctagatgagatgtcgttcacttttactga

SEQ ID NO: 502 - DNA, 121 bp, Homo sapiens
tcagtaaaagtgaacgacatctcatctaggtcaactgctgcaataaagatacagattccccacagttcctttttcttttgaatataacctccctgggaacaaaaaataaagatcaaatatt

SEQ ID NO: 503 - DNA, 17 bp, Homo sapiens
ggaactgtggggaatct

SEQ ID NO: 504 - DNA, 17 bp, Homo sapiens
agattccccacagttcc

SEQ ID NO: 505 - DNA, 121 bp, Homo sapiens
atttacttttttctattctttcctttgtagtgtccataaattctttaacttactaaaagaaattgataccagtaccaaagttgataatgctatgtcaagactgttgaagaagtatgatgta

SEQ ID NO: 506 - DNA, 121 bp, Homo sapiens
tacatcatacttcttcaacagtcttgacatagcattatcaactttggtactggtatcaatttcttttagtaagttaaagaatttatggacactacaaaggaaagaatagaaaaaagtaaat

SEQ ID NO: 507 - DNA, 17 bp, Homo sapiens
ctaaaagaaattgatac

SEQ ID NO: 508 - DNA, 17 bp, Homo sapiens
gtatcaatttcttttag

SEQ ID NO: 509 - DNA, 121 bp, Homo sapiens
tgatttacttttttctattctttcctttgtagtgtccataaattctttaacttactaaaagaaattgataccagtaccaaagttgataatgctatgtcaagactgttgaagaagtatgatg

SEQ ID NO: 510 - DNA, 121 bp, Homo sapiens
catcatacttcttcaacagtcttgacatagcattatcaactttggtactggtatcaatttcttttagtaagttaaagaatttatggacactacaaaggaaagaatagaaaaaagtaaatca

SEQ ID NO: 511 - DNA, 17 bp, Homo sapiens
tactaaaagaaattgat

SEQ ID NO: 512 - DNA, 17 bp, Homo sapiens
atcaatttcttttagta

SEQ ID NO: 513 - DNA, 121 bp, Homo sapiens
aaaatgttaaaaagtcataatgtttttcttttcaggacatgtgaacttatatatttgacacaacccagcagttcgtaagtagttcacagaatgttatttttcacttaaaaaaaaagatttt

SEQ ID NO: 514 - DNA, 121 bp, Homo sapiens
aaaatctttttttttaagtgaaaaataacattctgtgaactacttacgaactgctgggttgtgtcaaatatataagttcacatgtcctgaaaagaaaaacattatgactttttaacatttt

SEQ ID NO: 515 - DNA, 17 bp, Homo sapiens
atttgacacaacccagc

SEQ ID NO: 516 - DNA, 17 bp, Homo sapiens
gctgggttgtgtcaaat

SEQ ID NO: 517 - DNA, 121 bp, Homo sapiens
tgatacatttttcctgttttttttctgctttctatttgtttaataggatatctactgaaataaattctgcattggtgctaaaagtttcttggatcacatttttattagctaaaggtaagtt

SEQ ID NO: 518 - DNA, 121 bp, Homo sapiens
aacttacctttagctaataaaaatgtgatccaagaaacttttagcaccaatgcagaatttatttcagtagatatcctattaaacaaatagaaagcagaaaaaaaacaggaaaaatgtatca

SEQ ID NO: 519 - DNA, 17 bp, Homo sapiens
tactgaaataaattctg

SEQ ID NO: 520 - DNA, 17 bp, Homo sapiens
cagaatttatttcagta

SEQ ID NO: 521 - DNA, 121 bp, Homo sapiens
aaagatctgaatctctaactttctttaaaaatgtacatttttttttcaggggaagtattacaaatggaagatgatctggtgatttcatttcagttaatgctatgtgtccttgactatttta

SEQ ID NO: 522 - DNA, 121 bp, Homo sapiens
taaaatagtcaaggacacatagcattaactgaaatgaaatcaccagatcatcttccatttgtaatacttcccctgaaaaaaaaatgtacatttttaaagaaagttagagattcagatcttt

SEQ ID NO: 523 - DNA, 17 bp, Homo sapiens
aagtattacaaatggaa

SEQ ID NO: 524 - DNA, 17 bp, Homo sapiens
ttccatttgtaatactt

SEQ ID NO: 525 - DNA, 121 bp, Homo sapiens
gttcttatctaatttaccacttttacagaaacagctgttatacccattaatggttcacctcgaacacccaggcgaggtcagaacaggagtgcacggatagcaaaacaactagaaaatgata

SEQ ID NO: 526 - DNA, 121 bp, Homo sapiens
tatcattttctagttgttttgctatccgtgcactcctgttctgacctcgcctgggtgttcgaggtgaaccattaatgggtataacagctgtttctgtaaaagtggtaaattagataagaac

SEQ ID NO: 527 - DNA, 17 bp, Homo sapiens
gttcacctcgaacaccc

SEQ ID NO: 528 - DNA, 17 bp, Homo sapiens
gggtgttcgaggtgaac

SEQ ID NO: 529 - DNA, 121 bp, Homo sapiens
tttaccacttttacagaaacagctgttatacccattaatggttcacctcgaacacccaggcgaggtcagaacaggagtgcacggatagcaaaacaactagaaaatgatacaagaattattg

SEQ ID NO: 530 - DNA, 121 bp, Homo sapiens
caataattcttgtatcattttctagttgttttgctatccgtgcactcctgttctgacctcgcctgggtgttcgaggtgaaccattaatgggtataacagctgtttctgtaaaagtggtaaa

SEQ ID NO: 531 - DNA, 17 bp, Homo sapiens
cacccaggcgaggtcag

SEQ ID NO: 532 - DNA, 17 bp, Homo sapiens
ctgacctcgcctgggtg

SEQ ID NO: 533 - DNA, 121 bp, Homo sapiens
attaatggttcacctcgaacacccaggcgaggtcagaacaggagtgcacggatagcaaaacaactagaaaatgatacaagaattattgaagttctctgtaaagaacatgaatgtaatatag

SEQ ID NO: 534 - DNA, 121 bp, Homo sapiens
ctatattacattcatgttctttacagagaacttcaataattcttgtatcattttctagttgttttgctatccgtgcactcctgttctgacctcgcctgggtgttcgaggtgaaccattaat

SEQ ID NO: 535 - DNA, 17 bp, Homo sapiens
tagcaaaacaactagaa

SEQ ID NO: 536 - DNA, 17 bp, Homo sapiens
ttctagttgttttgcta

SEQ ID NO: 537 - DNA, 121 bp, Homo sapiens
tgacatgtaaaggataattgtcagtgacttttttctttcaaggttgaaaatctttctaaacgatacgaagaaatttatcttaaaaataaagatctagatgcaagattatttttggatcatg

SEQ ID NO: 538 - DNA, 121 bp, Homo sapiens
catgatccaaaaataatcttgcatctagatctttatttttaagataaatttcttcgtatcgtttagaaagattttcaaccttgaaagaaaaaagtcactgacaattatcctttacatgtca

SEQ ID NO: 539 - DNA, 17 bp, Homo sapiens
tttctaaacgatacgaa

SEQ ID NO: 540 - DNA, 17 bp, Homo sapiens
ttcgtatcgtttagaaa

SEQ ID NO: 541 - DNA, 121 bp, Homo sapiens
acaaattgtaaattttcagtatgtgaatgacttcacttattgttatttagttttgaaacacagagaacaccacgaaaaagtaaccttgatgaagaggtgaatgtaattcctccacacactc

SEQ ID NO: 542 - DNA, 121 bp, Homo sapiens
gagtgtgtggaggaattacattcacctcttcatcaaggttactttttcgtggtgttctctgtgtttcaaaactaaataacaataagtgaagtcattcacatactgaaaatttacaatttgt

SEQ ID NO: 543 - DNA, 17 bp, Homo sapiens
ttgaaacacagagaaca

SEQ ID NO: 544 - DNA, 17 bp, Homo sapiens
tgttctctgtgtttcaa

SEQ ID NO: 545 - DNA, 121 bp, Homo sapiens
ttttcagtatgtgaatgacttcacttattgttatttagttttgaaacacagagaacaccacgaaaaagtaaccttgatgaagaggtgaatgtaattcctccacacactccagttaggtatg

SEQ ID NO: 546 - DNA, 121 bp, Homo sapiens
catacctaactggagtgtgtggaggaattacattcacctcttcatcaaggttactttttcgtggtgttctctgtgtttcaaaactaaataacaataagtgaagtcattcacatactgaaaa

SEQ ID NO: 547 - DNA, 17 bp, Homo sapiens
gaacaccacgaaaaagt

SEQ ID NO: 548 - DNA, 17 bp, Homo sapiens
actttttcgtggtgttc

SEQ ID NO: 549 - DNA, 121 bp, Homo sapiens; identical to SEQ ID NO: 545

SEQ ID NO: 550 - DNA, 121 bp, Homo sapiens; identical to SEQ ID NO: 546

SEQ ID NO: 551 - DNA, 17 bp, Homo sapiens
gaacaccacgaaaaagt

SEQ ID NO: 552 - DNA, 17 bp, Homo sapiens
actttttcgtggtgttc

SEQ ID NO: 553 - DNA, 121 bp, Homo sapiens
ctgttatgaacactatccaacaattaatgatgattttaaattcagcaagtgatcaaccttcagaaaatctgatttcctattttaacgtaagccatatatgaaacattatttattgtaatat

SEQ ID NO: 554 - DNA, 121 bp, Homo sapiens
atattacaataaataatgtttcatatatggcttacgttaaaataggaaatcagattttctgaaggttgatcacttgctgaatttaaaatcatcattaattgttggatagtgttcataacag

SEQ ID NO: 555 - DNA, 17 bp, Homo sapiens
tcaaccttcagaaaatc

SEQ ID NO: 556 - DNA, 17 bp, Homo sapiens
gattttctgaaggttga

SEQ ID NO: 557 - DNA, 121 bp, Homo sapiens
tttcataattgtgattttctaaaatagcaggctcttatttttctttttgtttgtttgtagcgatacaaacttggagttcgcttgtattaccgagtaatggaatccatgcttaaatcagtaa

SEQ ID NO: 558 - DNA, 121 bp, Homo sapiens
ttactgatttaagcatggattccattactcggtaatacaagcgaactccaagtttgtatcgctacaaacaaacaaaaagaaaaataagagcctgctattttagaaaatcacaattatgaaa

SEQ ID NO: 559 - DNA, 17 bp, Homo sapiens
gtttgtagcgatacaaa

SEQ ID NO: 560 - DNA, 17 bp, Homo sapiens
tttgtatcgctacaaac

SEQ ID NO: 561 - DNA, 121 bp, Homo sapiens
gctcttatttttctttttgtttgtttgtagcgatacaaacttggagttcgcttgtattaccgagtaatggaatccatgcttaaatcagtaagttaaaaacaatataaaaaaatttcagccg

SEQ ID NO: 562 - DNA, 121 bp, Homo sapiens
cggctgaaatttttttatattgtttttaacttactgatttaagcatggattccattactcggtaatacaagcgaactccaagtttgtatcgctacaaacaaacaaaaagaaaaataagagc

SEQ ID NO: 563 - DNA, 17 bp, Homo sapiens
tgtattaccgagtaatg

SEQ ID NO: 564 - DNA, 17 bp, Homo sapiens
cattactcggtaataca

SEQ ID NO: 565 - DNA, 121 bp, Homo sapiens
atcgaaagttttatcaaagcagaaggcaacttgacaagagaaatgataaaacatttagaacgatgtgaacatcgaatcatggaatcccttgcatggctctcagtaagtagctaaataattg

SEQ ID NO: 566 - DNA, 121 bp, Homo sapiens
caattatttagctacttactgagagccatgcaagggattccatgattcgatgttcacatcgttctaaatgttttatcatttctcttgtcaagttgccttctgctttgataaaactttcgat

SEQ ID NO: 567 - DNA, 17 bp, Homo sapiens
atttagaacgatgtgaa

SEQ ID NO: 568 - DNA, 17 bp, Homo sapiens
ttcacatcgttctaaat

SEQ ID NO: 569 - DNA, 121 bp, Homo sapiens
aagttttatcaaagcagaaggcaacttgacaagagaaatgataaaacatttagaacgatgtgaacatcgaatcatggaatcccttgcatggctctcagtaagtagctaaataattgaagaa

SEQ ID NO: 570 - DNA, 121 bp, Homo sapiens
ttcttcaattatttagctacttactgagagccatgcaagggattccatgattcgatgttcacatcgttctaaatgttttatcatttctcttgtcaagttgccttctgctttgataaaactt

SEQ ID NO: 571 - DNA, 17 bp, Homo sapiens
gaacgatgtgaacatcg

SEQ ID NO: 572 - DNA, 17 bp, Homo sapiens
cgatgttcacatcgttc

SEQ ID NO: 573 - DNA, 121 bp, Homo sapiens
agttttatcaaagcagaaggcaacttgacaagagaaatgataaaacatttagaacgatgtgaacatcgaatcatggaatcccttgcatggctctcagtaagtagctaaataattgaagaaa

SEQ ID NO: 574 - DNA, 121 bp, Homo sapiens
tttcttcaattatttagctacttactgagagccatgcaagggattccatgattcgatgttcacatcgttctaaatgttttatcatttctcttgtcaagttgccttctgctttgataaaact

SEQ ID NO: 575 - DNA, 17 bp, Homo sapiens
aacgatgtgaacatcga

SEQ ID NO: 576 - DNA, 17 bp, Homo sapiens
tcgatgttcacatcgtt

SEQ ID NO: 577 - DNA, 121 bp, Homo sapiens
tacctgggaaaattatgcttactaatgtggttttaatttcatcatgtttcatataggattcacctttatttgatcttattaaacaatcaaaggaccgagaaggaccaactgatcaccttga

SEQ ID NO: 578 - DNA, 121 bp, Homo sapiens
tcaaggtgatcagttggtccttctcggtcctttgattgtttaataagatcaaataaaggtgaatcctatatgaaacatgatgaaattaaaaccacattagtaagcataattttcccaggta

SEQ ID NO: 579 - DNA, 17 bp, Homo sapiens
ataggattcacctttat

SEQ ID NO: 580 - DNA, 17 bp, Homo sapiens
ataaaggtgaatcctat

SEQ ID NO: 581 - DNA, 121 bp, Homo sapiens
aatgtggttttaatttcatcatgtttcatataggattcacctttatttgatcttattaaacaatcaaaggaccgagaaggaccaactgatcaccttgaatctgcttgtcctcttaatcttc

SEQ ID NO: 582 - DNA, 121 bp, Homo sapiens
gaagattaagaggacaagcagattcaaggtgatcagttggtccttctcggtcctttgattgtttaataagatcaaataaaggtgaatcctatatgaaacatgatgaaattaaaaccacatt

SEQ ID NO: 583 - DNA, 17 bp, Homo sapiens
ttattaaacaatcaaag

SEQ ID NO: 584 - DNA, 17 bp, Homo sapiens
ctttgattgtttaataa

SEQ ID NO: 585 - DNA, 121 bp, Homo sapiens
atttcatcatgtttcatataggattcacctttatttgatcttattaaacaatcaaaggaccgagaaggaccaactgatcaccttgaatctgcttgtcctcttaatcttcctctccagaata

SEQ ID NO: 586 - DNA, 121 bp, Homo sapiens
tattctggagaggaagattaagaggacaagcagattcaaggtgatcagttggtccttctcggtcctttgattgtttaataagatcaaataaaggtgaatcctatatgaaacatgatgaaat

SEQ ID NO: 587 - DNA, 17 bp, Homo sapiens
caaaggaccgagaagga

SEQ ID NO: 588 - DNA, 17 bp, Homo sapiens
tccttctcggtcctttg

SEQ ID NO: 589 - DNA, 121 bp, Homo sapiens
tcatcatgtttcatataggattcacctttatttgatcttattaaacaatcaaaggaccgagaaggaccaactgatcaccttgaatctgcttgtcctcttaatcttcctctccagaataatc

SEQ ID NO: 590 - DNA, 121 bp, Homo sapiens
gattattctggagaggaagattaagaggacaagcagattcaaggtgatcagttggtccttctcggtcctttgattgtttaataagatcaaataaaggtgaatcctatatgaaacatgatga

SEQ ID NO: 591 - DNA, 17 bp, Homo sapiens
aggaccgagaaggacca

SEQ ID NO: 592 - DNA, 17 bp, Homo sapiens
tggtccttctcggtcct

SEQ ID NO: 593 - DNA, 121 bp, Homo sapiens
agaaaaaaggttcaactacgcgtgtaaattctactgcaaatgcagagacacaagcaacctcagccttccagacccagaagccattgaaatctacctctctttcactgttttataaaaaagg

SEQ ID NO: 594 - DNA, 121 bp, Homo sapiens
ccttttttataaaacagtgaaagagaggtagatttcaatggcttctgggtctggaaggctgaggttgcttgtgtctctgcatttgcagtagaatttacacgcgtagttgaaccttttttct

SEQ ID NO: 595 - DNA, 17 bp, Homo sapiens
agcaacctcagccttcc

SEQ ID NO: 596 - DNA, 17 bp, Homo sapiens
ggaaggctgaggttgct

SEQ ID NO: 597 - DNA, 121 bp, Homo sapiens
aaaaaaggttcaactacgcgtgtaaattctactgcaaatgcagagacacaagcaacctcagccttccagacccagaagccattgaaatctacctctctttcactgttttataaaaaaggtt

SEQ ID NO: 598 - DNA, 121 bp, Homo sapiens
aaccttttttataaaacagtgaaagagaggtagatttcaatggcttctgggtctggaaggctgaggttgcttgtgtctctgcatttgcagtagaatttacacgcgtagttgaacctttttt

SEQ ID NO: 599 - DNA, 17 bp, Homo sapiens
caacctcagccttccag

SEQ ID NO: 600 - DNA, 17 bp, Homo sapiens
ctggaaggctgaggttg

SEQ ID NO: 601 - DNA, 121 bp, Homo sapiens
actacgcgtgtaaattctactgcaaatgcagagacacaagcaacctcagccttccagacccagaagccattgaaatctacctctctttcactgttttataaaaaaggttagtagatgatta

SEQ ID NO: 602 - DNA, 121 bp, Homo sapiens
taatcatctactaaccttttttataaaacagtgaaagagaggtagatttcaatggcttctgggtctggaaggctgaggttgcttgtgtctctgcatttgcagtagaatttacacgcgtagt

SEQ ID NO: 603 - DNA, 17 bp, Homo sapiens
tccagacccagaagcca

SEQ ID NO: 604 - DNA, 17 bp, Homo sapiens
tggcttctgggtctgga

SEQ ID NO: 605 - DNA, 121 bp, Homo sapiens
ttgtaattcaaaatgaacagtaaaaatgactaatttttcttattcccacagtgtatcggctagcctatctccggctaaatacactttgtgaacgccttctgtctgagcacccagaattaga

SEQ ID NO: 606 - DNA, 121 bp, Homo sapiens
tctaattctgggtgctcagacagaaggcgttcacaaagtgtatttagccggagataggctagccgatacactgtgggaataagaaaaattagtcatttttactgttcattttgaattacaa

SEQ ID NO: 607 - DNA, 17 bp, Homo sapiens
gtatcggctagcctatc

SEQ ID NO: 608 - DNA, 17 bp, Homo sapiens
gataggctagccgatac

SEQ ID NO: 609 - DNA, 121 bp, Homo sapiens
aatgaacagtaaaaatgactaatttttcttattcccacagtgtatcggctagcctatctccggctaaatacactttgtgaacgccttctgtctgagcacccagaattagaacatatcatct

SEQ ID NO: 610 - DNA, 121 bp, Homo sapiens
agatgatatgttctaattctgggtgctcagacagaaggcgttcacaaagtgtatttagccggagataggctagccgatacactgtgggaataagaaaaattagtcatttttactgttcatt

SEQ ID NO: 611 - DNA, 17 bp, Homo sapiens
cctatctccggctaaat

SEQ ID NO: 612 - DNA, 17 bp, Homo sapiens
atttagccggagatagg

SEQ ID NO: 613 - DNA, 121 bp, Homo sapiens
aacagtaaaaatgactaatttttcttattcccacagtgtatcggctagcctatctccggctaaatacactttgtgaacgccttctgtctgagcacccagaattagaacatatcatctggac

SEQ ID NO: 614 - DNA, 121 bp, Homo sapiens
gtccagatgatatgttctaattctgggtgctcagacagaaggcgttcacaaagtgtatttagccggagataggctagccgatacactgtgggaataagaaaaattagtcatttttactgtt

SEQ ID NO: 615 - DNA, 17 bp, Homo sapiens
tctccggctaaatacac

SEQ ID NO: 616 - DNA, 17 bp, Homo sapiens
gtgtatttagccggaga

SEQ ID NO: 617 - DNA, 121 bp, Homo sapiens
tatcggctagcctatctccggctaaatacactttgtgaacgccttctgtctgagcacccagaattagaacatatcatctggacccttttccagcacaccctgcagaatgagtatgaactca

SEQ ID NO: 618 - DNA, 121 bp, Homo sapiens
tgagttcatactcattctgcagggtgtgctggaaaagggtccagatgatatgttctaattctgggtgctcagacagaaggcgttcacaaagtgtatttagccggagataggctagccgata

SEQ ID NO: 619 - DNA, 17 bp, Homo sapiens
agcacccagaattagaa

SEQ ID NO: 620 - DNA, 17 bp, Homo sapiens
ttctaattctgggtgct

SEQ ID NO: 621 - DNA, 121 bp, Homo sapiens
tttgtgaacgccttctgtctgagcacccagaattagaacatatcatctggacccttttccagcacaccctgcagaatgagtatgaactcatgagagacaggcatttggaccaagtaagaaa

SEQ ID NO: 622 - DNA, 121 bp, Homo sapiens
tttcttacttggtccaaatgcctgtctctcatgagttcatactcattctgcagggtgtgctggaaaagggtccagatgatatgttctaattctgggtgctcagacagaaggcgttcacaaa

SEQ ID NO: 623 - DNA, 17 bp, Homo sapiens
ccttttccagcacaccc

SEQ ID NO: 624 - DNA, 17 bp, Homo sapiens
gggtgtgctggaaaagg

SEQ ID NO: 625 - DNA, 121 bp, Homo sapiens
aaaaccatgtaataaaattctgactacttttacatcaatttatttactagattatgatgtgttccatgtatggcatatgcaaagtgaagaatatagaccttaaattcaaaatcattgtaac

SEQ ID NO: 626 - DNA, 121 bp, Homo sapiens
gttacaatgattttgaatttaaggtctatattcttcactttgcatatgccatacatggaacacatcataatctagtaaataaattgatgtaaaagtagtcagaattttattacatggtttt

SEQ ID NO: 627 - DNA, 17 bp, Homo sapiens
tatgatgtgttccatgt

SEQ ID NO: 628 - DNA, 17 bp, Homo sapiens
acatggaacacatcata

SEQ ID NO: 629 - DNA, 121 bp, Homo sapiens
ttctgactacttttacatcaatttatttactagattatgatgtgttccatgtatggcatatgcaaagtgaagaatatagaccttaaattcaaaatcattgtaacagcatacaaggatcttc

SEQ ID NO: 630 - DNA, 121 bp, Homo sapiens
gaagatccttgtatgctgttacaatgattttgaatttaaggtctatattcttcactttgcatatgccatacatggaacacatcataatctagtaaataaattgatgtaaaagtagtcagaa

SEQ ID NO: 631 - DNA, 17 bp, Homo sapiens
atggcatatgcaaagtg

SEQ ID NO: 632 - DNA, 17 bp, Homo sapiens
cactttgcatatgccat

SEQ ID NO: 633 - DNA, 121 bp, Homo sapiens
gtatggcatatgcaaagtgaagaatatagaccttaaattcaaaatcattgtaacagcatacaaggatcttcctcatgctgttcaggaggtaggtaattttccatagtaagtttttttgata

SEQ ID NO: 634 - DNA, 121 bp, Homo sapiens
tatcaaaaaaacttactatggaaaattacctacctcctgaacagcatgaggaagatccttgtatgctgttacaatgattttgaatttaaggtctatattcttcactttgcatatgccatac

SEQ ID NO: 635 - DNA, 17 bp, Homo sapiens
acagcatacaaggatct

SEQ ID NO: 636 - DNA, 17 bp, Homo sapiens
agatccttgtatgctgt

SEQ ID NO: 637 - DNA, 121 bp, Homo sapiens
tttttttttttttttactgttcttcctcagacattcaaacgtgttttgatcaaagaagaggagtatgattctattatagtattctataactcggtcttcatgcagagactgaaaacaaata

SEQ ID NO: 638 - DNA, 121 bp, Homo sapiens
tatttgttttcagtctctgcatgaagaccgagttatagaatactataatagaatcatactcctcttctttgatcaaaacacgtttgaatgtctgaggaagaacagtaaaaaaaaaaaaaaa

SEQ ID NO: 639 - DNA, 17 bp, Homo sapiens
aagaagaggagtatgat

SEQ ID NO: 640 - DNA, 17 bp, Homo sapiens
atcatactcctcttctt

SEQ ID NO: 641 - DNA, 121 bp, Homo sapiens
gttttgatcaaagaagaggagtatgattctattatagtattctataactcggtcttcatgcagagactgaaaacaaatattttgcagtatgcttccaccagggtaggtcaaaagtatcctt

SEQ ID NO: 642 - DNA, 121 bp, Homo sapiens
aaggatacttttgacctaccctggtggaagcatactgcaaaatatttgttttcagtctctgcatgaagaccgagttatagaatactataatagaatcatactcctcttctttgatcaaaac

SEQ ID NO: 643 - DNA, 17 bp, Homo sapiens
tcttcatgcagagactg

SEQ ID NO: 644 - DNA, 17 bp, Homo sapiens
cagtctctgcatgaaga

SEQ ID NO: 645 - DNA, 121 bp, Homo sapiens
taatctacttttttgtttttgctctagccccctaccttgtcaccaatacctcacattcctcgaagcccttacaagtttcctagttcacccttacggattcctggagggaacatctatattt

SEQ ID NO: 646 - DNA, 121 bp, Homo sapiens
aaatatagatgttccctccaggaatccgtaagggtgaactaggaaacttgtaagggcttcgaggaatgtgaggtattggtgacaaggtagggggctagagcaaaaacaaaaaagtagatta

SEQ ID NO: 647 - DNA, 17 bp, Homo sapiens
acattcctcgaagccct

SEQ ID NO: 648 - DNA, 17 bp, Homo sapiens
agggcttcgaggaatgt

SEQ ID NO: 649 - DNA, 121 bp, Homo sapiens
ccttacggattcctggagggaacatctatatttcacccctgaagagtccatataaaatttcagaaggtctgccaacaccaacaaaaatgactccaagatcaaggtgtgtgttttctcttta

SEQ ID NO: 650 - DNA, 121 bp, Homo sapiens
taaagagaaaacacacaccttgatcttggagtcatttttgttggtgttggcagaccttctgaaattttatatggactcttcaggggtgaaatatagatgttccctccaggaatccgtaagg

SEQ ID NO: 651 - DNA, 17 bp, Homo sapiens
taaaatttcagaaggtc

SEQ ID NO: 652 - DNA, 17 bp, Homo sapiens
gaccttctgaaatttta

SEQ ID NO: 653 - DNA, 121 bp, Homo sapiens
ctgcgctcaggaggccttcaccctctgctctgggtaaagttcattggaacagaaagaaatggatttatctgctcttcgcgttgaagaagtacaaaatgtcattaatgctatgcagaaaatc

SEQ ID NO: 654 - DNA, 121 bp, Homo sapiens
gattttctgcatagcattaatgacattttgtacttcttcaacgcgaagagcagataaatccatttctttctgttccaatgaactttacccagagcagagggtgaaggcctcctgagcgcag

SEQ ID NO: 655 - DNA, 17 bp, Homo sapiens
aaagaaatggatttatc

SEQ ID NO: 656 - DNA, 17 bp, Homo sapiens
gataaatccatttcttt

SEQ ID NO: 657 - DNA, 121 bp, Homo sapiens
ctgggtaaagttcattggaacagaaagaaatggatttatctgctcttcgcgttgaagaagtacaaaatgtcattaatgctatgcagaaaatcttagagtgtcccatctgtctggagttgat

SEQ ID NO: 658 - DNA, 121 bp, Homo sapiens
atcaactccagacagatgggacactctaagattttctgcatagcattaatgacattttgtacttcttcaacgcgaagagcagataaatccatttctttctgttccaatgaactttacccag

SEQ ID NO: 659 - DNA, 17 bp, Homo sapiens
tgaagaagtacaaaatg

SEQ ID NO: 660 - DNA, 17 bp, Homo sapiens
cattttgtacttcttca

SEQ ID NO: 661 - DNA, 121 bp, Homo sapiens
atggatttatctgctcttcgcgttgaagaagtacaaaatgtcattaatgctatgcagaaaatcttagagtgtcccatctgtctggagttgatcaaggaacctgtctccacaaagtgtgacc

SEQ ID NO: 662 - DNA, 121 bp, Homo sapiens
ggtcacactttgtggagacaggttccttgatcaactccagacagatgggacactctaagattttctgcatagcattaatgacattttgtacttcttcaacgcgaagagcagataaatccat

SEQ ID NO: 663 - DNA, 17 bp, Homo sapiens
tgcagaaaatcttagag

SEQ ID NO: 664 - DNA, 17 bp, Homo sapiens
ctctaagattttctgca

SEQ ID NO: 665 - DNA, 121 bp, Homo sapiens
atttatctgctcttcgcgttgaagaagtacaaaatgtcattaatgctatgcagaaaatcttagagtgtcccatctgtctggagttgatcaaggaacctgtctccacaaagtgtgaccacat

SEQ ID NO: 666 - DNA, 121 bp, Homo sapiens
atgtggtcacactttgtggagacaggttccttgatcaactccagacagatgggacactctaagattttctgcatagcattaatgacattttgtacttcttcaacgcgaagagcagataaat

SEQ ID NO: 667 - DNA, 17 bp, Homo sapiens
gaaaatcttagagtgtc

SEQ ID NO: 668 - DNA, 17 bp, Homo sapiens
gacactctaagattttc

SEQ ID NO: 669 - DNA, 121 bp, Homo sapiens
agaaaatcttagagtgtcccatctgtctggagttgatcaaggaacctgtctccacaaagtgtgaccacatattttgcaaattttgcatgctgaaacttctcaaccagaagaaagggccttc

SEQ ID NO: 670 - DNA, 121 bp, Homo sapiens
gaaggccctttcttctggttgagaagtttcagcatgcaaaatttgcaaaatatgtggtcacactttgtggagacaggttccttgatcaactccagacagatgggacactctaagattttct

SEQ ID NO: 671 - DNA, 17 bp, Homo sapiens
cacaaagtgtgaccaca

SEQ ID NO: 672 - DNA, 17 bp, Homo sapiens
tgtggtcacactttgtg

SEQ ID NO: 673 - DNA, 121 bp, Homo sapiens
cacatattttgcaaattttgcatgctgaaacttctcaaccagaagaaagggccttcacagtgtcctttatgtaagaatgatataaccaaaaggagcctacaagaaagtacgagatttagtc

SEQ ID NO: 674 - DNA, 121 bp, Homo sapiens
gactaaatctcgtactttcttgtaggctccttttggttatatcattcttacataaaggacactgtgaaggccctttcttctggttgagaagtttcagcatgcaaaatttgcaaaatatgtg

SEQ ID NO: 675 - DNA, 17 bp, Homo sapiens
cttcacagtgtccttta

SEQ ID NO: 676 - DNA, 17 bp, Homo sapiens
taaaggacactgtgaag

SEQ ID NO: 677 - DNA, 121 bp, Homo sapiens
tttgcaaattttgcatgctgaaacttctcaaccagaagaaagggccttcacagtgtcctttatgtaagaatgatataaccaaaaggagcctacaagaaagtacgagatttagtcaacttgt

SEQ ID NO: 678 - DNA, 121 bp, Homo sapiens
acaagttgactaaatctcgtactttcttgtaggctccttttggttatatcattcttacataaaggacactgtgaaggccctttcttctggttgagaagtttcagcatgcaaaatttgcaaa

SEQ ID NO: 679 - DNA, 17 bp, Homo sapiens
gtgtcctttatgtaaga

SEQ ID NO: 680 - DNA, 17 bp, Homo sapiens
tcttacataaaggacac

SEQ ID NO: 681 - DNA, 121 bp, Homo sapiens
tgcaaattttgcatgctgaaacttctcaaccagaagaaagggccttcacagtgtcctttatgtaagaatgatataaccaaaaggagcctacaagaaagtacgagatttagtcaacttgttg

SEQ ID NO: 682 - DNA, 121 bp, Homo sapiens
caacaagttgactaaatctcgtactttcttgtaggctccttttggttatatcattcttacataaaggacactgtgaaggccctttcttctggttgagaagtttcagcatgcaaaatttgca

SEQ ID NO: 683 - DNA, 17 bp, Homo sapiens
gtcctttatgtaagaat

SEQ ID NO: 684 - DNA, 17 bp, Homo sapiens
attcttacataaaggac

SEQ ID NO: 685 - DNA, 121 bp, Homo sapiens
gcaaattttgcatgctgaaacttctcaaccagaagaaagggccttcacagtgtcctttatgtaagaatgatataaccaaaaggagcctacaagaaagtacgagatttagtcaacttgttga

SEQ ID NO: 686 - DNA, 121 bp, Homo sapiens
tcaacaagttgactaaatctcgtactttcttgtaggctccttttggttatatcattcttacataaaggacactgtgaaggccctttcttctggttgagaagtttcagcatgcaaaatttgc

SEQ ID NO: 687 - DNA, 17 bp, Homo sapiens
tcctttatgtaagaatg

SEQ ID NO: 688 - DNA, 17 bp, Homo sapiens
cattcttacataaagga

SEQ ID NO: 689 - DNA, 121 bp, Homo sapiens
cagaagaaagggccttcacagtgtcctttatgtaagaatgatataaccaaaaggagcctacaagaaagtacgagatttagtcaacttgttgaagagctattgaaaatcatttgtgcttttc

SEQ ID NO: 690 - DNA, 121 bp, Homo sapiens
gaaaagcacaaatgattttcaatagctcttcaacaagttgactaaatctcgtactttcttgtaggctccttttggttatatcattcttacataaaggacactgtgaaggccctttcttctg

SEQ ID NO: 691 - DNA, 17 bp, Homo sapiens
ggagcctacaagaaagt

SEQ ID NO: 692 - DNA, 17 bp, Homo sapiens
actttcttgtaggctcc

SEQ ID NO: 693 - DNA, 121 bp, Homo sapiens
agctattgaaaatcatttgtgcttttcagcttgacacaggtttggagtatgcaaacagctataattttgcaaaaaaggaaaataactctcctgaacatctaaaagatgaagtttctatcat

SEQ ID NO: 694 - DNA, 121 bp, Homo sapiens
atgatagaaacttcatcttttagatgttcaggagagttattttccttttttgcaaaattatagctgtttgcatactccaaacctgtgtcaagctgaaaagcacaaatgattttcaatagct

SEQ ID NO: 695 - DNA, 17 bp, Homo sapiens
aaacagctataattttg

SEQ ID NO: 696 - DNA, 17 bp, Homo sapiens
caaaattatagctgttt

SEQ ID NO: 697 - DNA, 121 bp, Homo sapiens
ctacagagtgaacccgaaaatccttccttgcaggaaaccagtctcagtgtccaactctctaaccttggaactgtgagaactctgaggacaaagcagcggatacaacctcaaaagacgtctg

SEQ ID NO: 698 - DNA, 121 bp, Homo sapiens
cagacgtcttttgaggttgtatccgctgctttgtcctcagagttctcacagttccaaggttagagagttggacactgagactggtttcctgcaaggaaggattttcgggttcactctgtag

SEQ ID NO: 699 - DNA, 17 bp, Homo sapiens
aactctctaaccttgga

SEQ ID NO: 700 - DNA, 17 bp, Homo sapiens
tccaaggttagagagtt

SEQ ID NO: 701 - DNA, 121 bp, Homo sapiens
gaaaccagtctcagtgtccaactctctaaccttggaactgtgagaactctgaggacaaagcagcggatacaacctcaaaagacgtctgtctacattgaattgggatctgattcttctgaag

SEQ ID NO: 702 - DNA, 121 bp, Homo sapiens
cttcagaagaatcagatcccaattcaatgtagacagacgtcttttgaggttgtatccgctgctttgtcctcagagttctcacagttccaaggttagagagttggacactgagactggtttc

SEQ ID NO: 703 - DNA, 17 bp, Homo sapiens
ggacaaagcagcggata

SEQ ID NO: 704 - DNA, 17 bp, Homo sapiens
tatccgctgctttgtcc

SEQ ID NO: 705 - DNA, 121 bp, Homo sapiens
ctcccagcacagaaaaaaaggtagatctgaatgctgatcccctgtgtgagagaaaagaatggaataagcagaaactgccatgctcagagaatcctagagatactgaagatgttccttggat

SEQ ID NO: 706 - DNA, 121 bp, Homo sapiens
atccaaggaacatcttcagtatctctaggattctctgagcatggcagtttctgcttattccattcttttctctcacacaggggatcagcattcagatctacctttttttctgtgctgggag

SEQ ID NO: 707 - DNA, 17 bp, Homo sapiens
aaaagaatggaataagc

SEQ ID NO: 708 - DNA, 17 bp, Homo sapiens
gcttattccattctttt

SEQ ID NO: 709 - DNA, 121 bp, Homo sapiens
atgctcagagaatcctagagatactgaagatgttccttggataacactaaatagcagcattcagaaagttaatgagtggttttccagaagtgatgaactgttaggttctgatgactcacat

SEQ ID NO: 710 - DNA, 121 bp, Homo sapiens
atgtgagtcatcagaacctaacagttcatcacttctggaaaaccactcattaactttctgaatgctgctatttagtgttatccaaggaacatcttcagtatctctaggattctctgagcat

SEQ ID NO: 711 - DNA, 17 bp, Homo sapiens
agcagcattcagaaagt

SEQ ID NO: 712 - DNA, 17 bp, Homo sapiens
actttctgaatgctgct

SEQ ID NO: 713 - DNA, 121 bp, Homo sapiens
gggagtctgaatcaaatgccaaagtagctgatgtattggacgttctaaatgaggtagatgaatattctggttcttcagagaaaatagacttactggccagtgatcctcatgaggctttaat

SEQ ID NO: 714 - DNA, 121 bp, Homo sapiens
attaaagcctcatgaggatcactggccagtaagtctattttctctgaagaaccagaatattcatctacctcatttagaacgtccaatacatcagctactttggcatttgattcagactccc

SEQ ID NO: 715 - DNA, 17 bp, Homo sapiens
ggtagatgaatattctg

SEQ ID NO: 716 - DNA, 17 bp, Homo sapiens
cagaatattcatctacc

SEQ ID NO: 717 - DNA, 121 bp, Homo sapiens
atatgtaaaagtgaaagagttcactccaaatcagtagagagtaatattgaagacaaaatatttgggaaaacctatcggaagaaggcaagcctccccaacttaagccatgtaactgaaaatc

SEQ ID NO: 718 - DNA, 121 bp, Homo sapiens
gattttcagttacatggcttaagttggggaggcttgccttcttccgataggttttcccaaatattttgtcttcaatattactctctactgatttggagtgaactctttcacttttacatat

SEQ ID NO: 719 - DNA, 17 bp, Homo sapiens
acaaaatatttgggaaa

SEQ ID NO: 720 - DNA, 17 bp, Homo sapiens
tttcccaaatattttgt

SEQ ID NO: 721 - DNA, 121 bp, Homo sapiens
gaaagagttcactccaaatcagtagagagtaatattgaagacaaaatatttgggaaaacctatcggaagaaggcaagcctccccaacttaagccatgtaactgaaaatctaattataggag

SEQ ID NO: 722 - DNA, 121 bp, Homo sapiens
ctcctataattagattttcagttacatggcttaagttggggaggcttgccttcttccgataggttttcccaaatattttgtcttcaatattactctctactgatttggagtgaactctttc

SEQ ID NO: 723 - DNA, 17 bp, Homo sapiens
ggaaaacctatcggaag

SEQ ID NO: 724 - DNA, 17 bp, Homo sapiens
cttccgataggttttcc

SEQ ID NO: 725 - DNA, 121 bp, Homo sapiens
acctatcggaagaaggcaagcctccccaacttaagccatgtaactgaaaatctaattataggagcatttgttactgagccacagataatacaagagcgtcccctcacaaataaattaaagc

SEQ ID NO: 726 - DNA, 121 bp, Homo sapiens
gctttaatttatttgtgaggggacgctcttgtattatctgtggctcagtaacaaatgctcctataattagattttcagttacatggcttaagttggggaggcttgccttcttccgataggt

SEQ ID NO: 727 - DNA, 17 bp, Homo sapiens
taattataggagcattt

SEQ ID NO: 728 - DNA, 17 bp, Homo sapiens
aaatgctcctataatta

SEQ ID NO: 729 - DNA, 121 bp, Homo sapiens
ttactgagccacagataatacaagagcgtcccctcacaaataaattaaagcgtaaaaggagacctacatcaggccttcatcctgaggattttatcaagaaagcagatttggcagttcaaaa

SEQ ID NO: 730 - DNA, 121 bp, Homo sapiens
ttttgaactgccaaatctgctttcttgataaaatcctcaggatgaaggcctgatgtaggtctccttttacgctttaatttatttgtgaggggacgctcttgtattatctgtggctcagtaa

SEQ ID NO: 731 - DNA, 17 bp, Homo sapiens
taaaaggagacctacat

SEQ ID NO: 732 - DNA, 17 bp, Homo sapiens
atgtaggtctcctttta

SEQ ID NO: 733 - DNA, 121 bp, Homo sapiens
cacagataatacaagagcgtcccctcacaaataaattaaagcgtaaaaggagacctacatcaggccttcatcctgaggattttatcaagaaagcagatttggcagttcaaaagactcctga

SEQ ID NO: 734 - DNA, 121 bp, Homo sapiens
tcaggagtcttttgaactgccaaatctgctttcttgataaaatcctcaggatgaaggcctgatgtaggtctccttttacgctttaatttatttgtgaggggacgctcttgtattatctgtg

SEQ ID NO: 735 - DNA, 17 bp, Homo sapiens
acctacatcaggccttc

SEQ ID NO: 736 - DNA, 17 bp, Homo sapiens
gaaggcctgatgtaggt

SEQ ID NO: 737 - DNA, 121 bp, Homo sapiens
aggagacctacatcaggccttcatcctgaggattttatcaagaaagcagatttggcagttcaaaagactcctgaaatgataaatcagggaactaaccaaacggagcagaatggtcaagtga

SEQ ID NO: 738 - DNA, 121 bp, Homo sapiens
tcacttgaccattctgctccgtttggttagttccctgatttatcatttcaggagtcttttgaactgccaaatctgctttcttgataaaatcctcaggatgaaggcctgatgtaggtctcct

SEQ ID NO: 739 - DNA, 17 bp, Homo sapiens
tggcagttcaaaagact

SEQ ID NO: 740 - DNA, 17 bp, Homo sapiens
agtcttttgaactgcca

SEQ ID NO: 741 - DNA, 121 bp, Homo sapiens; identical to SEQ ID NO: 737

SEQ ID NO: 742 - DNA, 121 bp, Homo sapiens; identical to SEQ ID NO: 738

SEQ ID NO: 743 - DNA, 17 bp, Homo sapiens
aaacggagcagaatggt

SEQ ID NO: 744 - DNA, 17 bp, Homo sapiens
accattctgctccgttt

SEQ ID NO: 745 - DNA, 121 bp, Homo sapiens
taaatcagggaactaaccaaacggagcagaatggtcaagtgatgaatattactaatagtggtcatgagaataaaacaaaaggtgattctattcagaatgagaaaaatcctaacccaataga

SEQ ID NO: 746 - DNA, 121 bp, Homo sapiens
tctattgggttaggatttttctcattctgaatagaatcaccttttgttttattctcatgaccactattagtaatattcatcacttgaccattctgctccgtttggttagttccctgattta

SEQ ID NO: 747 - DNA, 17 bp, Homo sapiens
taatagtggtcatgaga

SEQ ID NO: 748 - DNA, 17 bp, Homo sapiens
tctcatgaccactatta

SEQ ID NO: 749 - DNA, 121 bp, Homo sapiens
ggtcaagtgatgaatattactaatagtggtcatgagaataaaacaaaaggtgattctattcagaatgagaaaaatcctaacccaatagaatcactcgaaaaagaatctgctttcaaaacga

SEQ ID NO: 750 - DNA, 121 bp, Homo sapiens
tcgttttgaaagcagattctttttcgagtgattctattgggttaggatttttctcattctgaatagaatcaccttttgttttattctcatgaccactattagtaatattcatcacttgacc

SEQ ID NO: 751 - DNA, 17 bp, Homo sapiens
attctattcagaatgag

SEQ ID NO: 752 - DNA, 17 bp, Homo sapiens
ctcattctgaatagaat

SEQ ID NO: 753 - DNA, 121 bp, Homo sapiens
ataagcagcagtataagcaatatggaactcgaattaaatatccacaattcaaaagcacctaaaaagaataggctgaggaggaagtcttctaccaggcatattcatgcgcttgaactagtag

SEQ ID NO: 754 - DNA, 121 bp, Homo sapiens
ctactagttcaagcgcatgaatatgcctggtagaagacttcctcctcagcctattctttttaggtgcttttgaattgtggatatttaattcgagttccatattgcttatactgctgcttat

SEQ ID NO: 755 - DNA, 17 bp, Homo sapiens
aagcacctaaaaagaat

SEQ ID NO: 756 - DNA, 17 bp, Homo sapiens
attctttttaggtgctt

SEQ ID NO: 757 - DNA, 121 bp, Homo sapiens
atattcatgcgcttgaactagtagtcagtagaaatctaagcccacctaattgtactgaattgcaaattgatagttgttctagcagtgaagagataaagaaaaaaaagtacaaccaaatgcc

SEQ ID NO: 758 - DNA, 121 bp, Homo sapiens
ggcatttggttgtacttttttttctttatctcttcactgctagaacaactatcaatttgcaattcagtacaattaggtgggcttagatttctactgactactagttcaagcgcatgaatat

SEQ ID NO: 759 - DNA, 17 bp, Homo sapiens
tactgaattgcaaattg

SEQ ID NO: 760 - DNA, 17 bp, Homo sapiens
caatttgcaattcagta

SEQ ID NO: 761 - DNA, 121 bp, Homo sapiens
gaacctgcaactggagccaagaagagtaacaagccaaatgaacagacaagtaaaagacatgacagcgatactttcccagagctgaagttaacaaatgcacctggttcttttactaagtgtt

SEQ ID NO: 762 - DNA, 121 bp, Homo sapiens
aacacttagtaaaagaaccaggtgcatttgttaacttcagctctgggaaagtatcgctgtcatgtcttttacttgtctgttcatttggcttgttactcttcttggctccagttgcaggttc

SEQ ID NO: 763 - DNA, 17 bp, Homo sapiens
aaagacatgacagcgat

SEQ ID NO: 764 - DNA, 17 bp, Homo sapiens
atcgctgtcatgtcttt

SEQ ID NO: 765 - DNA, 121 bp, Homo sapiens
ctgaagttaacaaatgcacctggttcttttactaagtgttcaaataccagtgaacttaaagaatttgtcaatcctagccttccaagagaagaaaaagaagagaaactagaaacagttaaag

SEQ ID NO: 766 - DNA, 121 bp, Homo sapiens
ctttaactgtttctagtttctcttctttttcttctcttggaaggctaggattgacaaattctttaagttcactggtatttgaacacttagtaaaagaaccaggtgcatttgttaacttcag

SEQ ID NO: 767 - DNA, 17 bp, Homo sapiens
aacttaaagaatttgtc

SEQ ID NO: 768 - DNA, 17 bp, Homo sapiens
gacaaattctttaagtt

SEQ ID NO: 769 - DNA, 121 bp, Homo sapiens
ctagaaacagttaaagtgtctaataatgctgaagaccccaaagatctcatgttaagtggagaaagggttttgcaaactgaaagatctgtagagagtagcagtatttcattggtacctggta

SEQ ID NO: 770 - DNA, 121 bp, Homo sapiens
taccaggtaccaatgaaatactgctactctctacagatctttcagtttgcaaaaccctttctccacttaacatgagatctttggggtcttcagcattattagacactttaactgtttctag

SEQ ID NO: 771 - DNA, 17 bp, Homo sapiens
taagtggagaaagggtt

SEQ ID NO: 772 - DNA, 17 bp, Homo sapiens
aaccctttctccactta

SEQ ID NO: 773 - DNA, 121 bp, Homo sapiens
tcatgttaagtggagaaagggttttgcaaactgaaagatctgtagagagtagcagtatttcattggtacctggtactgattatggcactcaggaaagtatctcgttactggaagttagcac

SEQ ID NO: 774 - DNA, 121 bp, Homo sapiens
gtgctaacttccagtaacgagatactttcctgagtgccataatcagtaccaggtaccaatgaaatactgctactctctacagatctttcagtttgcaaaaccctttctccacttaacatga

SEQ ID NO: 775 - DNA, 17 bp, Homo sapiens
cagtatttcattggtac

SEQ ID NO: 776 - DNA, 17 bp, Homo sapiens
gtaccaatgaaatactg

SEQ ID NO: 777 - DNA, 121 bp, Homo sapiens
taagtggagaaagggttttgcaaactgaaagatctgtagagagtagcagtatttcattggtacctggtactgattatggcactcaggaaagtatctcgttactggaagttagcactctagg

SEQ ID NO: 778 - DNA, 121 bp, Homo sapiens
cctagagtgctaacttccagtaacgagatactttcctgagtgccataatcagtaccaggtaccaatgaaatactgctactctctacagatctttcagtttgcaaaaccctttctccactta

SEQ ID NO: 779 - DNA, 17 bp, Homo sapiens
ttcattggtacctggta

SEQ ID NO: 780 - DNA, 17 bp, Homo sapiens
taccaggtaccaatgaa

SEQ ID NO: 781 - DNA, 121 bp, Homo sapiens
actgaaagatctgtagagagtagcagtatttcattggtacctggtactgattatggcactcaggaaagtatctcgttactggaagttagcactctagggaaggcaaaaacagaaccaaata

SEQ ID NO: 782 - DNA, 121 bp, Homo sapiens
tatttggttctgtttttgccttccctagagtgctaacttccagtaacgagatactttcctgagtgccataatcagtaccaggtaccaatgaaatactgctactctctacagatctttcagt

SEQ ID NO: 783 - DNA, 17 bp, Homo sapiens
atggcactcaggaaagt

SEQ ID NO: 784 - DNA, 17 bp, Homo sapiens
actttcctgagtgccat

SEQ ID NO: 785 - DNA, 121 bp, Homo sapiens
tatggcactcaggaaagtatctcgttactggaagttagcactctagggaaggcaaaaacagaaccaaataaatgtgtgagtcagtgtgcagcatttgaaaaccccaagggactaattcatg

SEQ ID NO: 786 - DNA, 121 bp, Homo sapiens
catgaattagtcccttggggttttcaaatgctgcacactgactcacacatttatttggttctgtttttgccttccctagagtgctaacttccagtaacgagatactttcctgagtgccata

SEQ ID NO: 787 - DNA, 17 bp, Homo sapiens
caaaaacagaaccaaat

SEQ ID NO: 788 - DNA, 17 bp, Homo sapiens
atttggttctgtttttg

SEQ ID NO: 789 - DNA, 121 bp, Homo sapiens
aaatgtgtgagtcagtgtgcagcatttgaaaaccccaagggactaattcatggttgttccaaagataatagaaatgacacagaaggctttaagtatccattgggacatgaagttaaccaca

SEQ ID NO: 790 - DNA, 121 bp, Homo sapiens
tgtggttaacttcatgtcccaatggatacttaaagccttctgtgtcatttctattatctttggaacaaccatgaattagtcccttggggttttcaaatgctgcacactgactcacacattt

SEQ ID NO: 791 - DNA, 17 bp, Homo sapiens
gttgttccaaagataat

SEQ ID NO: 792 - DNA, 17 bp, Homo sapiens
attatctttggaacaac

SEQ ID NO: 793 - DNA, 121 bp, Homo sapiens
cagcatttgaaaaccccaagggactaattcatggttgttccaaagataatagaaatgacacagaaggctttaagtatccattgggacatgaagttaaccacagtcgggaaacaagcataga

SEQ ID NO: 794 - DNA, 121 bp, Homo sapiens
tctatgcttgtttcccgactgtggttaacttcatgtcccaatggatacttaaagccttctgtgtcatttctattatctttggaacaaccatgaattagtcccttggggttttcaaatgctg

SEQ ID NO: 795 - DNA, 17 bp, Homo sapiens
aaatgacacagaaggct

SEQ ID NO: 796 - DNA, 17 bp, Homo sapiens
agccttctgtgtcattt

SEQ ID NO: 797 - DNA, 121 bp, Homo sapiens
gataatagaaatgacacagaaggctttaagtatccattgggacatgaagttaaccacagtcgggaaacaagcatagaaatggaagaaagtgaacttgatgctcagtatttgcagaatacat

SEQ ID NO: 798 - DNA, 121 bp, Homo sapiens
atgtattctgcaaatactgagcatcaagttcactttcttccatttctatgcttgtttcccgactgtggttaacttcatgtcccaatggatacttaaagccttctgtgtcatttctattatc

SEQ ID NO: 799 - DNA, 17 bp, Homo sapiens
accacagtcgggaaaca

SEQ ID NO: 800 - DNA, 17 bp, Homo sapiens
tgtttcccgactgtggt

SEQ ID NO: 801 - DNA, 121 bp, Homo sapiens
aacttgatgctcagtatttgcagaatacattcaaggtttcaaagcgccagtcatttgctccgttttcaaatccaggaaatgcagaagaggaatgtgcaacattctctgcccactctgggtc

SEQ ID NO: 802 - DNA, 121 bp, Homo sapiens
gacccagagtgggcagagaatgttgcacattcctcttctgcatttcctggatttgaaaacggagcaaatgactggcgctttgaaaccttgaatgtattctgcaaatactgagcatcaagtt

SEQ ID NO: 803 - DNA, 17 bp, Homo sapiens
atttgctccgttttcaa

SEQ ID NO: 804 - DNA, 17 bp, Homo sapiens
ttgaaaacggagcaaat

SEQ ID NO: 805 - DNA, 121 bp, Homo sapiens
tttcaaatccaggaaatgcagaagaggaatgtgcaacattctctgcccactctgggtccttaaagaaacaaagtccaaaagtcacttttgaatgtgaacaaaaggaagaaaatcaaggaaa

SEQ ID NO: 806 - DNA, 121 bp, Homo sapiens
tttccttgattttcttccttttgttcacattcaaaagtgacttttggactttgtttctttaaggacccagagtgggcagagaatgttgcacattcctcttctgcatttcctggatttgaaa

SEQ ID NO: 807 - DNA, 17 bp, Homo sapiens
tgggtccttaaagaaac

SEQ ID NO: 808 - DNA, 17 bp, Homo sapiens
gtttctttaaggaccca

SEQ ID NO: 809 - DNA, 121 bp, Homo sapiens
cactctgggtccttaaagaaacaaagtccaaaagtcacttttgaatgtgaacaaaaggaagaaaatcaaggaaagaatgagtctaatatcaagcctgtacagacagttaatatcactgcag

SEQ ID NO: 810 - DNA, 121 bp, Homo sapiens
ctgcagtgatattaactgtctgtacaggcttgatattagactcattctttccttgattttcttccttttgttcacattcaaaagtgacttttggactttgtttctttaaggacccagagtg

SEQ ID NO: 811 - DNA, 17 bp, Homo sapiens
aaaaggaagaaaatcaa

SEQ ID NO: 812 - DNA, 17 bp, Homo sapiens
ttgattttcttcctttt

SEQ ID NO: 813 - DNA, 121 bp, Homo sapiens
ataatgccaaatgtagtatcaaaggaggctctaggttttgtctatcatctcagttcagaggcaacgaaactggactcattactccaaataaacatggacttttacaaaacccatatcgtat

SEQ ID NO: 814 - DNA, 121 bp, Homo sapiens
atacgatatgggttttgtaaaagtccatgtttatttggagtaatgagtccagtttcgttgcctctgaactgagatgatagacaaaacctagagcctcctttgatactacatttggcattat

SEQ ID NO: 815 - DNA, 17 bp, Homo sapiens
gttcagaggcaacgaaa

SEQ ID NO: 816 - DNA, 17 bp, Homo sapiens
tttcgttgcctctgaac

SEQ ID NO: 817 - DNA, 121 bp, Homo sapiens
atttgttaaaactaaatgtaagaaaaatctgctagaggaaaactttgaggaacattcaatgtcacctgaaagagaaatgggaaatgagaacattccaagtacagtgagcacaattagccgt

SEQ ID NO: 818 - DNA, 121 bp, Homo sapiens
acggctaattgtgctcactgtacttggaatgttctcatttcccatttctctttcaggtgacattgaatgttcctcaaagttttcctctagcagatttttcttacatttagttttaacaaat

SEQ ID NO: 819 - DNA, 17 bp, Homo sapiens
cattcaatgtcacctga

SEQ ID NO: 820 - DNA, 17 bp, Homo sapiens
tcaggtgacattgaatg

SEQ ID NO: 821 - DNA, 121 bp, Homo sapiens
actttgaggaacattcaatgtcacctgaaagagaaatgggaaatgagaacattccaagtacagtgagcacaattagccgtaataacattagagaaaatgtttttaaagaagccagctcaag

SEQ ID NO: 822 - DNA, 121 bp, Homo sapiens
cttgagctggcttctttaaaaacattttctctaatgttattacggctaattgtgctcactgtacttggaatgttctcatttcccatttctctttcaggtgacattgaatgttcctcaaagt

SEQ ID NO: 823 - DNA, 17 bp, Homo sapiens
tccaagtacagtgagca

SEQ ID NO: 824 - DNA, 17 bp, Homo sapiens
tgctcactgtacttgga

SEQ ID NO: 825 - DNA, 121 bp, Homo sapiens
acattccaagtacagtgagcacaattagccgtaataacattagagaaaatgtttttaaagaagccagctcaagcaatattaatgaagtaggttccagtactaatgaagtgggctccagtat

SEQ ID NO: 826 - DNA, 121 bp, Homo sapiens
atactggagcccacttcattagtactggaacctacttcattaatattgcttgagctggcttctttaaaaacattttctctaatgttattacggctaattgtgctcactgtacttggaatgt

SEQ ID NO: 827 - DNA, 17 bp, Homo sapiens
ttttaaagaagccagct

SEQ ID NO: 828 - DNA, 17 bp, Homo sapiens
agctggcttctttaaaa

SEQ ID NO: 829 - DNA, 121 bp, Homo sapiens
caagtacagtgagcacaattagccgtaataacattagagaaaatgtttttaaagaagccagctcaagcaatattaatgaagtaggttccagtactaatgaagtgggctccagtattaatga

SEQ ID NO: 830 - DNA, 121 bp, Homo sapiens
tcattaatactggagcccacttcattagtactggaacctacttcattaatattgcttgagctggcttctttaaaaacattttctctaatgttattacggctaattgtgctcactgtacttg

SEQ ID NO: 831 - DNA, 17 bp, Homo sapiens
agaagccagctcaagca

SEQ ID NO: 832 - DNA, 17 bp, Homo sapiens
tgcttgagctggcttct

SEQ ID NO: 833 - DNA, 121 bp, Homo sapiens
gccgtaataacattagagaaaatgtttttaaagaagccagctcaagcaatattaatgaagtaggttccagtactaatgaagtgggctccagtattaatgaaataggttccagtgatgaaaa

SEQ ID NO: 834 - DNA, 121 bp, Homo sapiens
ttttcatcactggaacctatttcattaatactggagcccacttcattagtactggaacctacttcattaatattgcttgagctggcttctttaaaaacattttctctaatgttattacggc

SEQ ID NO: 835 - DNA, 17 bp, Homo sapiens
taatgaagtaggttcca

SEQ ID NO: 836 - DNA, 17 bp, Homo sapiens
tggaacctacttcatta

SEQ ID NO: 837 - DNA, 121 bp, Homo sapiens
aaataggttccagtgatgaaaacattcaagcagaactaggtagaaacagagggccaaaattgaatgctatgcttagattaggggttttgcaacctgaggtctataaacaaagtcttcctgg

SEQ ID NO: 838 - DNA, 121 bp, Homo sapiens
ccaggaagactttgtttatagacctcaggttgcaaaacccctaatctaagcatagcattcaattttggccctctgtttctacctagttctgcttgaatgttttcatcactggaacctattt

SEQ ID NO: 839 - DNA, 17 bp, Homo sapiens
gccaaaattgaatgcta

SEQ ID NO: 840 - DNA, 17 bp, Homo sapiens
tagcattcaattttggc

SEQ ID NO: 841 - DNA, 121 bp, Homo sapiens
aaaacattcaagcagaactaggtagaaacagagggccaaaattgaatgctatgcttagattaggggttttgcaacctgaggtctataaacaaagtcttcctggaagtaattgtaagcatcc

SEQ ID NO: 842 - DNA, 121 bp, Homo sapiens
ggatgcttacaattacttccaggaagactttgtttatagacctcaggttgcaaaacccctaatctaagcatagcattcaattttggccctctgtttctacctagttctgcttgaatgtttt

SEQ ID NO: 843 - DNA, 17 bp, Homo sapiens
gcttagattaggggttt

SEQ ID NO: 844 - DNA, 17 bp, Homo sapiens
aaacccctaatctaagc

SEQ ID NO: 845 - DNA, 121 bp, Homo sapiens
agcaagaatatgaagaagtagttcagactgttaatacagatttctctccatatctgatttcagataacttagaacagcctatgggaagtagtcatgcatctcaggtttgttctgagacacc

SEQ ID NO: 846 - DNA, 121 bp, Homo sapiens
ggtgtctcagaacaaacctgagatgcatgactacttcccataggctgttctaagttatctgaaatcagatatggagagaaatctgtattaacagtctgaactacttcttcatattcttgct

SEQ ID NO: 847 - DNA, 17 bp, Homo sapiens
tctgatttcagataact

SEQ ID NO: 848 - DNA, 17 bp, Homo sapiens
agttatctgaaatcaga

SEQ ID NO: 849 - DNA, 121 bp, Homo sapiens
ctagttttgctgaaaatgacattaaggaaagttctgctgtttttagcaaaagcgtccagaaaggagagcttagcaggagtcctagccctttcacccatacacatttggctcagggttaccg

SEQ ID NO: 850 - DNA, 121 bp, Homo sapiens
cggtaaccctgagccaaatgtgtatgggtgaaagggctaggactcctgctaagctctcctttctggacgcttttgctaaaaacagcagaactttccttaatgtcattttcagcaaaactag

SEQ ID NO: 851 - DNA, 17 bp, Homo sapiens
cgtccagaaaggagagc

SEQ ID NO: 852 - DNA, 17 bp, Homo sapiens
gctctcctttctggacg

SEQ ID NO: 853 - DNA, 121 bp, Homo sapiens
agcgtccagaaaggagagcttagcaggagtcctagccctttcacccatacacatttggctcagggttaccgaagaggggccaagaaattagagtcctcagaagagaacttatctagtgagg

SEQ ID NO: 854 - DNA, 121 bp, Homo sapiens
cctcactagataagttctcttctgaggactctaatttcttggcccctcttcggtaaccctgagccaaatgtgtatgggtgaaagggctaggactcctgctaagctctcctttctggacgct

SEQ ID NO: 855 - DNA, 17 bp, Homo sapiens
atttggctcagggttac

SEQ ID NO: 856 - DNA, 17 bp, Homo sapiens
gtaaccctgagccaaat

SEQ ID NO: 857 - DNA, 121 bp, Homo sapiens
aaaggagagcttagcaggagtcctagccctttcacccatacacatttggctcagggttaccgaagaggggccaagaaattagagtcctcagaagagaacttatctagtgaggatgaagagc

SEQ ID NO: 858 - DNA, 121 bp, Homo sapiens
gctcttcatcctcactagataagttctcttctgaggactctaatttcttggcccctcttcggtaaccctgagccaaatgtgtatgggtgaaagggctaggactcctgctaagctctccttt

SEQ ID NO: 859 - DNA, 17 bp, Homo sapiens
agggttaccgaagaggg

SEQ ID NO: 860 - DNA, 17 bp, Homo sapiens
ccctcttcggtaaccct

SEQ ID NO: 861 - DNA, 121 bp, Homo sapiens
acccatacacatttggctcagggttaccgaagaggggccaagaaattagagtcctcagaagagaacttatctagtgaggatgaagagcttccctgcttccaacacttgttatttggtaaag

SEQ ID NO: 862 - DNA, 121 bp, Homo sapiens
ctttaccaaataacaagtgttggaagcagggaagctcttcatcctcactagataagttctcttctgaggactctaatttcttggcccctcttcggtaaccctgagccaaatgtgtatgggt

SEQ ID NO: 863 - DNA, 17 bp, Homo sapiens
cctcagaagagaactta

SEQ ID NO: 864 - DNA, 17 bp, Homo sapiens
taagttctcttctgagg

SEQ ID NO: 865 - DNA, 121 bp, Homo sapiens
tcagggttaccgaagaggggccaagaaattagagtcctcagaagagaacttatctagtgaggatgaagagcttccctgcttccaacacttgttatttggtaaagtaaacaatataccttct

SEQ ID NO: 866 - DNA, 121 bp, Homo sapiens
agaaggtatattgtttactttaccaaataacaagtgttggaagcagggaagctcttcatcctcactagataagttctcttctgaggactctaatttcttggcccctcttcggtaaccctga

SEQ ID NO: 867 - DNA, 17 bp, Homo sapiens
tctagtgaggatgaaga

SEQ ID NO: 868 - DNA, 17 bp, Homo sapiens
tcttcatcctcactaga

SEQ ID NO: 869 - DNA, 121 bp, Homo sapiens
ggttaccgaagaggggccaagaaattagagtcctcagaagagaacttatctagtgaggatgaagagcttccctgcttccaacacttgttatttggtaaagtaaacaatataccttctcagt

SEQ ID NO: 870 - DNA, 121 bp, Homo sapiens
actgagaaggtatattgtttactttaccaaataacaagtgttggaagcagggaagctcttcatcctcactagataagttctcttctgaggactctaatttcttggcccctcttcggtaacc

SEQ ID NO: 871 - DNA, 17 bp, Homo sapiens
gtgaggatgaagagctt

SEQ ID NO: 872 - DNA, 17 bp, Homo sapiens
aagctcttcatcctcac

SEQ ID NO: 873 - DNA, 121 bp, Homo sapiens
ttatttggtaaagtaaacaatataccttctcagtctactaggcatagcaccgttgctaccgagtgtctgtctaagaacacagaggagaatttattatcattgaagaatagcttaaatgact

SEQ ID NO: 874 - DNA, 121 bp, Homo sapiens
agtcatttaagctattcttcaatgataataaattctcctctgtgttcttagacagacactcggtagcaacggtgctatgcctagtagactgagaaggtatattgtttactttaccaaataa

SEQ ID NO: 875 - DNA, 17 bp, Homo sapiens
ttgctaccgagtgtctg

SEQ ID NO: 876 - DNA, 17 bp, Homo sapiens
cagacactcggtagcaa

SEQ ID NO: 877 - DNA, 121 bp, Homo sapiens
ctaggcatagcaccgttgctaccgagtgtctgtctaagaacacagaggagaatttattatcattgaagaatagcttaaatgactgcagtaaccaggtaatattggcaaaggcatctcagga

SEQ ID NO: 878 - DNA, 121 bp, Homo sapiens
tcctgagatgcctttgccaatattacctggttactgcagtcatttaagctattcttcaatgataataaattctcctctgtgttcttagacagacactcggtagcaacggtgctatgcctag

SEQ ID NO: 879 - DNA, 17 bp, Homo sapiens
tttattatcattgaaga

SEQ ID NO: 880 - DNA, 17 bp, Homo sapiens
tcttcaatgataataaa

SEQ ID NO: 881 - DNA, 121 bp, Homo sapiens
ttatcattgaagaatagcttaaatgactgcagtaaccaggtaatattggcaaaggcatctcaggaacatcaccttagtgaggaaacaaaatgttctgctagcttgttttcttcacagtgca

SEQ ID NO: 882 - DNA, 121 bp, Homo sapiens
tgcactgtgaagaaaacaagctagcagaacattttgtttcctcactaaggtgatgttcctgagatgcctttgccaatattacctggttactgcagtcatttaagctattcttcaatgataa

SEQ ID NO: 883 - DNA, 17 bp, Homo sapiens
aggcatctcaggaacat

SEQ ID NO: 884 - DNA, 17 bp, Homo sapiens
atgttcctgagatgcct

SEQ ID NO: 885 - DNA, 121 bp, Homo sapiens
gctagcttgttttcttcacagtgcagtgaattggaagacttgactgcaaatacaaacacccaggatcctttcttgattggttcttccaaacaaatgaggcatcagtctgaaagccagggag

SEQ ID NO: 886 - DNA, 121 bp, Homo sapiens
ctccctggctttcagactgatgcctcatttgtttggaagaaccaatcaagaaaggatcctgggtgtttgtatttgcagtcaagtcttccaattcactgcactgtgaagaaaacaagctagc

SEQ ID NO: 887 - DNA, 17 bp, Homo sapiens
caaacacccaggatcct

SEQ ID NO: 888 - DNA, 17 bp, Homo sapiens
aggatcctgggtgtttg

SEQ ID NO: 889 - DNA, 121 bp, Homo sapiens
tcacagtgcagtgaattggaagacttgactgcaaatacaaacacccaggatcctttcttgattggttcttccaaacaaatgaggcatcagtctgaaagccagggagttggtctgagtgaca

SEQ ID NO: 890 - DNA, 121 bp, Homo sapiens
tgtcactcagaccaactccctggctttcagactgatgcctcatttgtttggaagaaccaatcaagaaaggatcctgggtgtttgtatttgcagtcaagtcttccaattcactgcactgtga

SEQ ID NO: 891 - DNA, 17 bp, Homo sapiens
ctttcttgattggttct

SEQ ID NO: 892 - DNA, 17 bp, Homo sapiens
agaaccaatcaagaaag

SEQ ID NO: 893 - DNA, 121 bp, Homo sapiens
ttggaagacttgactgcaaatacaaacacccaggatcctttcttgattggttcttccaaacaaatgaggcatcagtctgaaagccagggagttggtctgagtgacaaggaattggtttcag

SEQ ID NO: 894 - DNA, 121 bp, Homo sapiens
ctgaaaccaattccttgtcactcagaccaactccctggctttcagactgatgcctcatttgtttggaagaaccaatcaagaaaggatcctgggtgtttgtatttgcagtcaagtcttccaa

SEQ ID NO: 895 - DNA, 17 bp, Homo sapiens
cttccaaacaaatgagg

SEQ ID NO: 896 - DNA, 17 bp, Homo sapiens
cctcatttgtttggaag

SEQ ID NO: 897 - DNA, 121 bp, Homo sapiens
cagtctgaaagccagggagttggtctgagtgacaaggaattggtttcagatgatgaagaaagaggaacgggcttggaagaaaataatcaagaagagcaaagcatggattcaaacttaggta

SEQ ID NO: 898 - DNA, 121 bp, Homo sapiens
tacctaagtttgaatccatgctttgctcttcttgattattttcttccaagcccgttcctctttcttcatcatctgaaaccaattccttgtcactcagaccaactccctggctttcagactg

SEQ ID NO: 899 - DNA, 17 bp, Homo sapiens
atgaagaaagaggaacg

SEQ ID NO: 900 - DNA, 17 bp, Homo sapiens
cgttcctctttcttcat

SEQ ID NO: 901 - DNA, 121 bp, Homo sapiens
gaaacaagcgtctctgaagactgctcagggctatcctctcagagtgacattttaaccactcaggtaaaaagcgtgtgtgtgtgtgcacatgcgtgtgtgtggtgtcctttgcattcagtag

SEQ ID NO: 902 - DNA, 121 bp, Homo sapiens
ctactgaatgcaaaggacaccacacacacgcatgtgcacacacacacacgctttttacctgagtggttaaaatgtcactctgagaggatagccctgagcagtcttcagagacgcttgtttc

SEQ ID NO: 903 - DNA, 17 bp, Homo sapiens
taaccactcaggtaaaa

SEQ ID NO: 904 - DNA, 17 bp, Homo sapiens
ttttacctgagtggtta

SEQ ID NO: 905 - DNA, 121 bp, Homo sapiens
tggtgccatttatcgtttttgaagcagagggataccatgcaacataacctgataaagctccagcaggaaatggctgaactagaagctgtgttagaacagcatgggagccagccttctaaca

SEQ ID NO: 906 - DNA, 121 bp, Homo sapiens
tgttagaaggctggctcccatgctgttctaacacagcttctagttcagccatttcctgctggagctttatcaggttatgttgcatggtatccctctgcttcaaaaacgataaatggcacca

SEQ ID NO: 907 - DNA, 17 bp, Homo sapiens
taaagctccagcaggaa

SEQ ID NO: 908 - DNA, 17 bp, Homo sapiens
ttcctgctggagcttta

SEQ ID NO: 909 - DNA, 121 bp, Homo sapiens
agccagccttctaacagctacccttccatcataagtgactcttctgcccttgaggacctgcgaaatccagaacaaagcacatcagaaaaaggtgtgtattgttggccaaacactgatatct

SEQ ID NO: 910 - DNA, 121 bp, Homo sapiens
agatatcagtgtttggccaacaatacacacctttttctgatgtgctttgttctggatttcgcaggtcctcaagggcagaagagtcacttatgatggaagggtagctgttagaaggctggct

SEQ ID NO: 911 - DNA, 17 bp, Homo sapiens
aggacctgcgaaatcca

SEQ ID NO: 912 - DNA, 17 bp, Homo sapiens
tggatttcgcaggtcct

SEQ ID NO: 913 - DNA, 121 bp, Homo sapiens
cagaatagaaactacccatctcaagaggagctcattaaggttgttgatgtggaggagcaacagctggaagagtctgggccacacgatttgacggaaacatcttacttgccaaggcaagatc

SEQ ID NO: 914 - DNA, 121 bp, Homo sapiens
gatcttgccttggcaagtaagatgtttccgtcaaatcgtgtggcccagactcttccagctgttgctcctccacatcaacaaccttaatgagctcctcttgagatgggtagtttctattctg

SEQ ID NO: 915 - DNA, 17 bp, Homo sapiens
aggagcaacagctggaa

SEQ ID NO: 916 - DNA, 17 bp, Homo sapiens
ttccagctgttgctcct

SEQ ID NO: 917 - DNA, 121 bp, Homo sapiens
atctttctaggtcatccccttctaaatgcccatcattagatgataggtggtacatgcacagttgctctgggagtcttcagaatagaaactacccatctcaagaggagctcattaaggttgt

SEQ ID NO: 918 - DNA, 121 bp, Homo sapiens
acaaccttaatgagctcctcttgagatgggtagtttctattctgaagactcccagagcaactgtgcatgtaccacctatcatctaatgatgggcatttagaaggggatgacctagaaagat

SEQ ID NO: 919 - DNA, 17 bp, Homo sapiens
catgcacagttgctctg

SEQ ID NO: 920 - DNA, 17 bp, Homo sapiens
cagagcaactgtgcatg

SEQ ID NO: 921 - DNA, 121 bp, Homo sapiens; identical to SEQ ID NO: 913

SEQ ID NO: 922 - DNA, 121 bp, Homo sapiens; identical to SEQ ID NO: 914

SEQ ID NO: 923 - DNA, 17 bp, Homo sapiens
aggagcaacagctggaa

SEQ ID NO: 924 - DNA, 17 bp, Homo sapiens
ttccagctgttgctcct

SEQ ID NO: 925 - DNA, 121 bp, Homo sapiens
aactacccatctcaagaggagctcattaaggttgttgatgtggaggagcaacagctggaagagtctgggccacacgatttgacggaaacatcttacttgccaaggcaagatctaggtaata

SEQ ID NO: 926 - DNA, 121 bp, Homo sapiens
tattacctagatcttgccttggcaagtaagatgtttccgtcaaatcgtgtggcccagactcttccagctgttgctcctccacatcaacaaccttaatgagctcctcttgagatgggtagtt

SEQ ID NO: 927 - DNA, 17 bp, Homo sapiens
agctggaagagtctggg

SEQ ID NO: 928 - DNA, 17 bp, Homo sapiens
cccagactcttccagct

SEQ ID NO: 929 - DNA, 121 bp, Homo sapiens
tttgtaattcaacattcatcgttgtgtaaattaaacttctcccattcctttcagagggaaccccttacctggaatctggaatcagcctcttctctgatgaccctgaatctgatccttctga

SEQ ID NO: 930 - DNA, 121 bp, Homo sapiens
tcagaaggatcagattcagggtcatcagagaagaggctgattccagattccaggtaaggggttccctctgaaaggaatgggagaagtttaatttacacaacgatgaatgttgaattacaaa

SEQ ID NO: 931 - DNA, 17 bp, Homo sapiens
agagggaaccccttacc

SEQ ID NO: 932 - DNA, 17 bp, Homo sapiens
ggtaaggggttccctct

SEQ ID NO: 933 - DNA, 121 bp, Homo sapiens
caacattcatcgttgtgtaaattaaacttctcccattcctttcagagggaaccccttacctggaatctggaatcagcctcttctctgatgaccctgaatctgatccttctgaagacagagc

SEQ ID NO: 934 - DNA, 121 bp, Homo sapiens
gctctgtcttcagaaggatcagattcagggtcatcagagaagaggctgattccagattccaggtaaggggttccctctgaaaggaatgggagaagtttaatttacacaacgatgaatgttg

SEQ ID NO: 935 - DNA, 17 bp, Homo sapiens
cccttacctggaatctg

SEQ ID NO: 936 - DNA, 17 bp, Homo sapiens
cagattccaggtaaggg

SEQ ID NO: 937 - DNA, 121 bp, Homo sapiens
gccccagagtcagctcgtgttggcaacataccatcttcaacctctgcattgaaagttccccaattgaaagttgcagaatctgcccagagtccagctgctgctcatactactgatactgctg

SEQ ID NO: 938 - DNA, 121 bp, Homo sapiens
cagcagtatcagtagtatgagcagcagctggactctgggcagattctgcaactttcaattggggaactttcaatgcagaggttgaagatggtatgttgccaacacgagctgactctggggc

SEQ ID NO: 939 - DNA, 17 bp, Homo sapiens
aagttccccaattgaaa

SEQ ID NO: 940 - DNA, 17 bp, Homo sapiens
tttcaattggggaactt

SEQ ID NO: 941 - DNA, 121 bp, Homo sapiens
gagtcagctcgtgttggcaacataccatcttcaacctctgcattgaaagttccccaattgaaagttgcagaatctgcccagagtccagctgctgctcatactactgatactgctgggtata

SEQ ID NO: 942 - DNA, 121 bp, Homo sapiens
tatacccagcagtatcagtagtatgagcagcagctggactctgggcagattctgcaactttcaattggggaactttcaatgcagaggttgaagatggtatgttgccaacacgagctgactc

SEQ ID NO: 943 - DNA, 17 bp, Homo sapiens
cccaattgaaagttgca

SEQ ID NO: 944 - DNA, 17 bp, Homo sapiens
tgcaactttcaattggg

SEQ ID NO: 945 - DNA, 121 bp, Homo sapiens
cagaatctgcccagagtccagctgctgctcatactactgatactgctgggtataatgcaatggaagaaagtgtgagcagggagaagccagaattgacagcttcaacagaaagggtcaacaa

SEQ ID NO: 946 - DNA, 121 bp, Homo sapiens
ttgttgaccctttctgttgaagctgtcaattctggcttctccctgctcacactttcttccattgcattatacccagcagtatcagtagtatgagcagcagctggactctgggcagattctg

SEQ ID NO: 947 - DNA, 17 bp, Homo sapiens
taatgcaatggaagaaa

SEQ ID NO: 948 - DNA, 17 bp, Homo sapiens
tttcttccattgcatta

SEQ ID NO: 949 - DNA, 121 bp, Homo sapiens
gcagaatctgcccagagtccagctgctgctcatactactgatactgctgggtataatgcaatggaagaaagtgtgagcagggagaagccagaattgacagcttcaacagaaagggtcaaca

SEQ ID NO: 950 - DNA, 121 bp, Homo sapiens
tgttgaccctttctgttgaagctgtcaattctggcttctccctgctcacactttcttccattgcattatacccagcagtatcagtagtatgagcagcagctggactctgggcagattctgc

SEQ ID NO: 951 - DNA, 17 bp, Homo sapiens
ataatgcaatggaagaa

SEQ ID NO: 952 - DNA, 17 bp, Homo sapiens
ttcttccattgcattat

SEQ ID NO: 953 - DNA, 121 bp, Homo sapiens
ctcatactactgatactgctgggtataatgcaatggaagaaagtgtgagcagggagaagccagaattgacagcttcaacagaaagggtcaacaaaagaatgtccatggtggtgtctggcct

SEQ ID NO: 954 - DNA, 121 bp, Homo sapiens
aggccagacaccaccatggacattcttttgttgaccctttctgttgaagctgtcaattctggcttctccctgctcacactttcttccattgcattatacccagcagtatcagtagtatgag

SEQ ID NO: 955 - DNA, 17 bp, Homo sapiens
ggagaagccagaattga

SEQ ID NO: 956 - DNA, 17 bp, Homo sapiens
tcaattctggcttctcc

SEQ ID NO: 957 - DNA, 121 bp, Homo sapiens
gagcagggagaagccagaattgacagcttcaacagaaagggtcaacaaaagaatgtccatggtggtgtctggcctgaccccagaagaatttgtgagtgtatccatatgtatctccctaatg

SEQ ID NO: 958 - DNA, 121 bp, Homo sapiens
cattagggagatacatatggatacactcacaaattcttctggggtcaggccagacaccaccatggacattcttttgttgaccctttctgttgaagctgtcaattctggcttctccctgctc

SEQ ID NO: 959 - DNA, 17 bp, Homo sapiens
atgtccatggtggtgtc

SEQ ID NO: 960 - DNA, 17 bp, Homo sapiens
gacaccaccatggacat

SEQ ID NO: 961 - DNA, 121 bp, Homo sapiens
cacttcctgattttgttttcaacttctaatcctttgagtgtttttcattctgcagatgctgagtttgtgtgtgaacggacactgaaatattttctaggaattgcgggaggaaaatgggtag

SEQ ID NO: 962 - DNA, 121 bp, Homo sapiens
ctacccattttcctcccgcaattcctagaaaatatttcagtgtccgttcacacacaaactcagcatctgcagaatgaaaaacactcaaaggattagaagttgaaaacaaaatcaggaagtg

SEQ ID NO: 963 - DNA, 17 bp, Homo sapiens
cagatgctgagtttgtg

SEQ ID NO: 964 - DNA, 17 bp, Homo sapiens
cacaaactcagcatctg

SEQ ID NO: 965 - DNA, 121 bp, Homo sapiens
gtgtttttcattctgcagatgctgagtttgtgtgtgaacggacactgaaatattttctaggaattgcgggaggaaaatgggtagttagctatttctgtaagtataatactatttctcccct

SEQ ID NO: 966 - DNA, 121 bp, Homo sapiens
aggggagaaatagtattatacttacagaaatagctaactacccattttcctcccgcaattcctagaaaatatttcagtgtccgttcacacacaaactcagcatctgcagaatgaaaaacac

SEQ ID NO: 967 - DNA, 17 bp, Homo sapiens
ttttctaggaattgcgg

SEQ ID NO: 968 - DNA, 17 bp, Homo sapiens
ccgcaattcctagaaaa

SEQ ID NO: 969 - DNA, 121 bp, Homo sapiens
ttcattctgcagatgctgagtttgtgtgtgaacggacactgaaatattttctaggaattgcgggaggaaaatgggtagttagctatttctgtaagtataatactatttctcccctcctccc

SEQ ID NO: 970 - DNA, 121 bp, Homo sapiens
gggaggaggggagaaatagtattatacttacagaaatagctaactacccattttcctcccgcaattcctagaaaatatttcagtgtccgttcacacacaaactcagcatctgcagaatgaa

SEQ ID NO: 971 - DNA, 17 bp, Homo sapiens
aggaattgcgggaggaa

SEQ ID NO: 972 - DNA, 17 bp, Homo sapiens
ttcctcccgcaattcct

SEQ ID NO: 973 - DNA, 121 bp, Homo sapiens
ctgagtttgtgtgtgaacggacactgaaatattttctaggaattgcgggaggaaaatgggtagttagctatttctgtaagtataatactatttctcccctcctccctttaacacctcagaa

SEQ ID NO: 974 - DNA, 121 bp, Homo sapiens
ttctgaggtgttaaagggaggaggggagaaatagtattatacttacagaaatagctaactacccattttcctcccgcaattcctagaaaatatttcagtgtccgttcacacacaaactcag

SEQ ID NO: 975 - DNA, 17 bp, Homo sapiens
aaaatgggtagttagct

SEQ ID NO: 976 - DNA, 17 bp, Homo sapiens
agctaactacccatttt

SEQ ID NO: 977 - DNA, 121 bp, Homo sapiens
aacggacactgaaatattttctaggaattgcgggaggaaaatgggtagttagctatttctgtaagtataatactatttctcccctcctccctttaacacctcagaattgcatttttacacc

SEQ ID NO: 978 - DNA, 121 bp, Homo sapiens
ggtgtaaaaatgcaattctgaggtgttaaagggaggaggggagaaatagtattatacttacagaaatagctaactacccattttcctcccgcaattcctagaaaatatttcagtgtccgtt

SEQ ID NO: 979 - DNA, 17 bp, Homo sapiens
ctatttctgtaagtata

SEQ ID NO: 980 - DNA, 17 bp, Homo sapiens
tatacttacagaaatag

SEQ ID NO: 981 - DNA, 121 bp, Homo sapiens
ttctgctgtatgtaacctgtcttttctatgatctctttaggggtgacccagtctattaaagaaagaaaaatgctgaatgaggtaagtacttgatgttacaaactaaccagagatattcatt

SEQ ID NO: 982 - DNA, 121 bp, Homo sapiens
aatgaatatctctggttagtttgtaacatcaagtacttacctcattcagcatttttctttctttaatagactgggtcacccctaaagagatcatagaaaagacaggttacatacagcagaa

SEQ ID NO: 983 - DNA, 17 bp, Homo sapiens
ctattaaagaaagaaaa

SEQ ID NO: 984 - DNA, 17 bp, Homo sapiens
ttttctttctttaatag

SEQ ID NO: 985 - DNA, 121 bp, Homo sapiens
tgtatgtaacctgtcttttctatgatctctttaggggtgacccagtctattaaagaaagaaaaatgctgaatgaggtaagtacttgatgttacaaactaaccagagatattcattcagtca

SEQ ID NO: 986 - DNA, 121 bp, Homo sapiens
tgactgaatgaatatctctggttagtttgtaacatcaagtacttacctcattcagcatttttctttctttaatagactgggtcacccctaaagagatcatagaaaagacaggttacataca

SEQ ID NO: 987 - DNA, 17 bp, Homo sapiens
aagaaagaaaaatgctg

SEQ ID NO: 988 - DNA, 17 bp, Homo sapiens
cagcatttttctttctt

SEQ ID NO: 989 - DNA, 121 bp, Homo sapiens
tctttcagcatgattttgaagtcagaggagatgtggtcaatggaagaaaccaccaaggtccaaagcgagcaagagaatcccaggacagaaaggtaaagctccctccctcaagttgacaaaa

SEQ ID NO: 990 - DNA, 121 bp, Homo sapiens
ttttgtcaacttgagggagggagctttacctttctgtcctgggattctcttgctcgctttggaccttggtggtttcttccattgaccacatctcctctgacttcaaaatcatgctgaaaga

SEQ ID NO: 991 - DNA, 17 bp, Homo sapiens
ccaaggtccaaagcgag

SEQ ID NO: 992 - DNA, 17 bp, Homo sapiens
ctcgctttggaccttgg

SEQ ID NO: 993 - DNA, 121 bp, Homo sapiens
cagcatgattttgaagtcagaggagatgtggtcaatggaagaaaccaccaaggtccaaagcgagcaagagaatcccaggacagaaaggtaaagctccctccctcaagttgacaaaaatctc

SEQ ID NO: 994 - DNA, 121 bp, Homo sapiens
gagatttttgtcaacttgagggagggagctttacctttctgtcctgggattctcttgctcgctttggaccttggtggtttcttccattgaccacatctcctctgacttcaaaatcatgctg

SEQ ID NO: 995 - DNA, 17 bp, Homo sapiens
gtccaaagcgagcaaga

SEQ ID NO: 996 - DNA, 17 bp, Homo sapiens
tcttgctcgctttggac

SEQ ID NO: 997 - DNA, 121 bp, Homo sapiens
gtcagaggagatgtggtcaatggaagaaaccaccaaggtccaaagcgagcaagagaatcccaggacagaaaggtaaagctccctccctcaagttgacaaaaatctcaccccaccactctgt

SEQ ID NO: 998 - DNA, 121 bp, Homo sapiens
acagagtggtggggtgagatttttgtcaacttgagggagggagctttacctttctgtcctgggattctcttgctcgctttggaccttggtggtttcttccattgaccacatctcctctgac

SEQ ID NO: 999 - DNA, 17 bp, Homo sapiens
gagaatcccaggacaga

SEQ ID NO: 1000 - DNA, 17 bp, Homo sapiens
tctgtcctgggattctc

SEQ ID NO: 1001 - DNA, 121 bp, Homo sapiens
ctctcttcttccagatcttcagggggctagaaatctgttgctatgggcccttcaccaacatgcccacaggtaagagcctgggagaaccccagagttccagcaccagcctttgtcttacata

SEQ ID NO: 1002 - DNA, 121 bp, Homo sapiens
tatgtaagacaaaggctggtgctggaactctggggttctcccaggctcttacctgtgggcatgttggtgaagggcccatagcaacagatttctagccccctgaagatctggaagaagagag

SEQ ID NO: 1003 - DNA, 17 bp, Homo sapiens
caccaacatgcccacag

SEQ ID NO: 1004 - DNA, 17 bp, Homo sapiens
ctgtgggcatgttggtg

SEQ ID NO: 1005 - DNA, 121 bp, Homo sapiens
agtatgcagattactgcagtgattttacatctaaatgtccattttagatcaactggaatggatggtacagctgtgtggtgcttctgtggtgaaggagctttcatcattcacccttggcaca

SEQ ID NO: 1006 - DNA, 121 bp, Homo sapiens
tgtgccaagggtgaatgatgaaagctccttcaccacagaagcaccacacagctgtaccatccattccagttgatctaaaatggacatttagatgtaaaatcactgcagtaatctgcatact

SEQ ID NO: 1007 - DNA, 17 bp, Homo sapiens
ctggaatggatggtaca

SEQ ID NO: 1008 - DNA, 17 bp, Homo sapiens
tgtaccatccattccag

SEQ ID NO: 1009 - DNA, 121 bp, Homo sapiens
attactgcagtgattttacatctaaatgtccattttagatcaactggaatggatggtacagctgtgtggtgcttctgtggtgaaggagctttcatcattcacccttggcacagtaagtatt

SEQ ID NO: 1010 - DNA, 121 bp, Homo sapiens
aatacttactgtgccaagggtgaatgatgaaagctccttcaccacagaagcaccacacagctgtaccatccattccagttgatctaaaatggacatttagatgtaaaatcactgcagtaat

SEQ ID NO: 1011 - DNA, 17 bp, Homo sapiens
atggtacagctgtgtgg

SEQ ID NO: 1012 - DNA, 17 bp, Homo sapiens
ccacacagctgtaccat

SEQ ID NO: 1013 - DNA, 121 bp, Homo sapiens
gtccattttagatcaactggaatggatggtacagctgtgtggtgcttctgtggtgaaggagctttcatcattcacccttggcacagtaagtattgggtgccctgtcagagagggaggacac

SEQ ID NO: 1014 - DNA, 121 bp, Homo sapiens
gtgtcctccctctctgacagggcacccaatacttactgtgccaagggtgaatgatgaaagctccttcaccacagaagcaccacacagctgtaccatccattccagttgatctaaaatggac

SEQ ID NO: 1015 - DNA, 17 bp, Homo sapiens
gtgaaggagctttcatc

SEQ ID NO: 1016 - DNA, 17 bp, Homo sapiens
gatgaaagctccttcac

SEQ ID NO: 1017 - DNA, 121 bp, Homo sapiens
ctctgcttgtgttctctgtctccagcaattgggcagatgtgtgaggcacctgtggtgacccgagagtgggtgttggacagtgtagcactctaccagtgccaggagctggacacctacctga

SEQ ID NO: 1018 - DNA, 121 bp, Homo sapiens
tcaggtaggtgtccagctcctggcactggtagagtgctacactgtccaacacccactctcgggtcaccacaggtgcctcacacatctgcccaattgctggagacagagaacacaagcagag

SEQ ID NO: 1019 - DNA, 17 bp, Homo sapiens
tggtgacccgagagtgg

SEQ ID NO: 1020 - DNA, 17 bp, Homo sapiens
ccactctcgggtcacca

SEQ ID NO: 1021 - DNA, 121 bp, Homo sapiens
ttgtgttctctgtctccagcaattgggcagatgtgtgaggcacctgtggtgacccgagagtgggtgttggacagtgtagcactctaccagtgccaggagctggacacctacctgatacccc

SEQ ID NO: 1022 - DNA, 121 bp, Homo sapiens
ggggtatcaggtaggtgtccagctcctggcactggtagagtgctacactgtccaacacccactctcgggtcaccacaggtgcctcacacatctgcccaattgctggagacagagaacacaa

SEQ ID NO: 1023 - DNA, 17 bp, Homo sapiens
cccgagagtgggtgttg

SEQ ID NO: 1024 - DNA, 17 bp, Homo sapiens
caacacccactctcggg

SEQ ID NO: 1025 - DNA, 121 bp, Homo sapiens
tgtgttctctgtctccagcaattgggcagatgtgtgaggcacctgtggtgacccgagagtgggtgttggacagtgtagcactctaccagtgccaggagctggacacctacctgatacccca

SEQ ID NO: 1026 - DNA, 121 bp, Homo sapiens
tggggtatcaggtaggtgtccagctcctggcactggtagagtgctacactgtccaacacccactctcgggtcaccacaggtgcctcacacatctgcccaattgctggagacagagaacaca

SEQ ID NO: 1027 - DNA, 17 bp, Homo sapiens
ccgagagtgggtgttgg

SEQ ID NO: 1028 - DNA, 17 bp, Homo sapiens
ccaacacccactctcgg

SEQ ID NO: 1029 - DNA, 121 bp, Homo sapiens
gttaaaactaaggtgggattttttttttaaatagatttaggaccaataagtcttaattggtttgaagaactttcttcagaagctccaccctataattctgaacctgcagaagaatctgaac

SEQ ID NO: 1030 - DNA, 121 bp, Homo sapiens
gttcagattcttctgcaggttcagaattatagggtggagcttctgaagaaagttcttcaaaccaattaagacttattggtcctaaatctatttaaaaaaaaaatcccaccttagttttaac

SEQ ID NO: 1031 - DNA, 17 bp, Homo sapiens
ttaattggtttgaagaa

SEQ ID NO: 1032 - DNA, 17 bp, Homo sapiens
ttcttcaaaccaattaa

SEQ ID NO: 1033 - DNA, 121 bp, Homo sapiens
tagatttaggaccaataagtcttaattggtttgaagaactttcttcagaagctccaccctataattctgaacctgcagaagaatctgaacataaaaacaacaattacgaaccaaacctatt

SEQ ID NO: 1034 - DNA, 121 bp, Homo sapiens
aataggtttggttcgtaattgttgtttttatgttcagattcttctgcaggttcagaattatagggtggagcttctgaagaaagttcttcaaaccaattaagacttattggtcctaaatcta

SEQ ID NO: 1035 - DNA, 17 bp, Homo sapiens
tccaccctataattctg

SEQ ID NO: 1036 - DNA, 17 bp, Homo sapiens
cagaattatagggtgga

SEQ ID NO: 1037 - DNA, 121 bp, Homo sapiens
aagaactttcttcagaagctccaccctataattctgaacctgcagaagaatctgaacataaaaacaacaattacgaaccaaacctatttaaaactccacaaaggaaaccatcttataatca

SEQ ID NO: 1038 - DNA, 121 bp, Homo sapiens
tgattataagatggtttcctttgtggagttttaaataggtttggttcgtaattgttgtttttatgttcagattcttctgcaggttcagaattatagggtggagcttctgaagaaagttctt

SEQ ID NO: 1039 - DNA, 17 bp, Homo sapiens
tgaacataaaaacaaca

SEQ ID NO: 1040 - DNA, 17 bp, Homo sapiens
tgttgtttttatgttca

SEQ ID NO: 1041 - DNA, 121 bp, Homo sapiens
ctatttaaaactccacaaaggaaaccatcttataatcagctggcttcaactccaataatattcaaagagcaagggctgactctgccgctgtaccaatctcctgtaaaagaattagataaat

SEQ ID NO: 1042 - DNA, 121 bp, Homo sapiens
atttatctaattcttttacaggagattggtacagcggcagagtcagcccttgctctttgaatattattggagttgaagccagctgattataagatggtttcctttgtggagttttaaatag

SEQ ID NO: 1043 - DNA, 17 bp, Homo sapiens
caataatattcaaagag

SEQ ID NO: 1044 - DNA, 17 bp, Homo sapiens
ctctttgaatattattg

SEQ ID NO: 1045 - DNA, 121 bp, Homo sapiens
gtcagacaccaaaacatatttctgaaagtctaggagctgaggtggatcctgatatgtcttggtcaagttctttagctacaccacccacccttagttctactgtgctcataggtaataatag

SEQ ID NO: 1046 - DNA, 121 bp, Homo sapiens
ctattattacctatgagcacagtagaactaagggtgggtggtgtagctaaagaacttgaccaagacatatcaggatccacctcagctcctagactttcagaaatatgttttggtgtctgac

SEQ ID NO: 1047 - DNA, 17 bp, Homo sapiens
tatgtcttggtcaagtt

SEQ ID NO: 1048 - DNA, 17 bp, Homo sapiens
aacttgaccaagacata

SEQ ID NO: 1049 - DNA, 121 bp, Homo sapiens
ctgaaagtctaggagctgaggtggatcctgatatgtcttggtcaagttctttagctacaccacccacccttagttctactgtgctcataggtaataatagcaaatgtgtatttacaagaaa

SEQ ID NO: 1050 - DNA, 121 bp, Homo sapiens
tttcttgtaaatacacatttgctattattacctatgagcacagtagaactaagggtgggtggtgtagctaaagaacttgaccaagacatatcaggatccacctcagctcctagactttcag

SEQ ID NO: 1051 - DNA, 17 bp, Homo sapiens
agctacaccacccaccc

SEQ ID NO: 1052 - DNA, 17 bp, Homo sapiens
gggtgggtggtgtagct

SEQ ID NO: 1053 - DNA, 121 bp, Homo sapiens
acaatacacataaatttttatcttacagtcagaaatgaagaagcatctgaaactgtatttcctcatgatactactgctgtaagtaaatatgacattgattagactgttgaaattgctaaca

SEQ ID NO: 1054 - DNA, 121 bp, Homo sapiens
tgttagcaatttcaacagtctaatcaatgtcatatttacttacagcagtagtatcatgaggaaatacagtttcagatgcttcttcatttctgactgtaagataaaaatttatgtgtattgt

SEQ ID NO: 1055 - DNA, 17 bp, Homo sapiens
ctgtatttcctcatgat

SEQ ID NO: 1056 - DNA, 17 bp, Homo sapiens
atcatgaggaaatacag

SEQ ID NO: 1057 - DNA, 121 bp, Homo sapiens
aatggtctcaactaaccctttcaggtctaaatggagcccagatggagaaaatacccctattgcatatttcttcatgtgaccaaaatatttcagaaaaagacctattagacacagagaacaa

SEQ ID NO: 1058 - DNA, 121 bp, Homo sapiens
ttgttctctgtgtctaataggtctttttctgaaatattttggtcacatgaagaaatatgcaataggggtattttctccatctgggctccatttagacctgaaagggttagttgagaccatt

SEQ ID NO: 1059 - DNA, 17 bp, Homo sapiens
acccctattgcatattt

SEQ ID NO: 1060 - DNA, 17 bp, Homo sapiens
aaatatgcaataggggt

SEQ ID NO: 1061 - DNA, 121 bp, Homo sapiens
agcctctgaaagtggactggaaatacatactgtttgctcacagaaggaggactccttatgtccaaatttaattgataatggaagctggccagccaccaccacacagaattctgtagctttg

SEQ ID NO: 1062 - DNA, 121 bp, Homo sapiens
caaagctacagaattctgtgtggtggtggctggccagcttccattatcaattaaatttggacataaggagtcctccttctgtgagcaaacagtatgtatttccagtccactttcagaggct

SEQ ID NO: 1063 - DNA, 17 bp, Homo sapiens
tccttatgtccaaattt

SEQ ID NO: 1064 - DNA, 17 bp, Homo sapiens
aaatttggacataagga

SEQ ID NO: 1065 - DNA, 121 bp, Homo sapiens
aactctaccatggttttatatggagacacaggtgataaacaagcaacccaagtgtcaattaaaaaagatttggtttatgttcttgcagaggagaacaaaaatagtgtaaagcagcatataa

SEQ ID NO: 1066 - DNA, 121 bp, Homo sapiens
ttatatgctgctttacactatttttgttctcctctgcaagaacataaaccaaatcttttttaattgacacttgggttgcttgtttatcacctgtgtctccatataaaaccatggtagagtt

SEQ ID NO: 1067 - DNA, 17 bp, Homo sapiens
tgtcaattaaaaaagat

SEQ ID NO: 1068 - DNA, 17 bp, Homo sapiens
atcttttttaattgaca

SEQ ID NO: 1069 - DNA, 121 bp, Homo sapiens
atgactactggcacttttgttgaagaaattactgaaaattacaagagaaatactgaaaatgaagataacaaatatactgctgccagtagaaattctcataacttagaatttgatggcagtg

SEQ ID NO: 1070 - DNA, 121 bp, Homo sapiens
cactgccatcaaattctaagttatgagaatttctactggcagcagtatatttgttatcttcattttcagtatttctcttgtaattttcagtaatttcttcaacaaaagtgccagtagtcat

SEQ ID NO: 1071 - DNA, 17 bp, Homo sapiens
ctgaaaatgaagataac

SEQ ID NO: 1072 - DNA, 17 bp, Homo sapiens
gttatcttcattttcag

SEQ ID NO: 1073 - DNA, 121 bp, Homo sapiens
catgaaacaattaaaaaagtgaaagacatatttacagacagtttcagtaaagtaattaaggaaaacaacgagaataaatcaaaaatttgccaaacgaaaattatggcaggttgttacgagg

SEQ ID NO: 1074 - DNA, 121 bp, Homo sapiens
cctcgtaacaacctgccataattttcgtttggcaaatttttgatttattctcgttgttttccttaattactttactgaaactgtctgtaaatatgtctttcacttttttaattgtttcatg

SEQ ID NO: 1075 - DNA, 17 bp, Homo sapiens
taattaaggaaaacaac

SEQ ID NO: 1076 - DNA, 17 bp, Homo sapiens
gttgttttccttaatta

SEQ ID NO: 1077 - DNA, 121 bp, Homo sapiens
tgaaagacatatttacagacagtttcagtaaagtaattaaggaaaacaacgagaataaatcaaaaatttgccaaacgaaaattatggcaggttgttacgaggcattggatgattcagagga

SEQ ID NO: 1078 - DNA, 121 bp, Homo sapiens
tcctctgaatcatccaatgcctcgtaacaacctgccataattttcgtttggcaaatttttgatttattctcgttgttttccttaattactttactgaaactgtctgtaaatatgtctttca

SEQ ID NO: 1079 - DNA, 17 bp, Homo sapiens
gaataaatcaaaaattt

SEQ ID NO: 1080 - DNA, 17 bp, Homo sapiens
aaatttttgatttattc

SEQ ID NO: 1081 - DNA, 121 bp, Homo sapiens
aaccaaaatatgtctggattggagaaagtttctaaaatatcaccttgtgatgttagtttggaaacttcagatatatgtaaatgtagtatagggaagcttcataagtcagtctcatctgcaa

SEQ ID NO: 1082 - DNA, 121 bp, Homo sapiens
ttgcagatgagactgacttatgaagcttccctatactacatttacatatatctgaagtttccaaactaacatcacaaggtgatattttagaaactttctccaatccagacatattttggtt

SEQ ID NO: 1083 - DNA, 17 bp, Homo sapiens
ttagtttggaaacttca

SEQ ID NO: 1084 - DNA, 17 bp, Homo sapiens
tgaagtttccaaactaa

SEQ ID NO: 1085 - DNA, 121 bp, Homo sapiens
ttagtttggaaacttcagatatatgtaaatgtagtatagggaagcttcataagtcagtctcatctgcaaatacttgtgggatttttagcacagcaagtggaaaatctgtccaggtatcaga

SEQ ID NO: 1086 - DNA, 121 bp, Homo sapiens
tctgatacctggacagattttccacttgctgtgctaaaaatcccacaagtatttgcagatgagactgacttatgaagcttccctatactacatttacatatatctgaagtttccaaactaa

SEQ ID NO: 1087 - DNA, 17 bp, Homo sapiens
gtcagtctcatctgcaa

SEQ ID NO: 1088 - DNA, 17 bp, Homo sapiens
ttgcagatgagactgac

SEQ ID NO: 1089 - DNA, 121 bp, Homo sapiens
aagtcagtctcatctgcaaatacttgtgggatttttagcacagcaagtggaaaatctgtccaggtatcagatgcttcattacaaaacgcaagacaagtgttttctgaaatagaagatagta

SEQ ID NO: 1090 - DNA, 121 bp, Homo sapiens
tactatcttctatttcagaaaacacttgtcttgcgttttgtaatgaagcatctgatacctggacagattttccacttgctgtgctaaaaatcccacaagtatttgcagatgagactgactt

SEQ ID NO: 1091 - DNA, 17 bp, Homo sapiens
aatctgtccaggtatca

SEQ ID NO: 1092 - DNA, 17 bp, Homo sapiens
tgatacctggacagatt

SEQ ID NO: 1093 - DNA, 121 bp, Homo sapiens
aaaataagattaatgacaatgagattcatcagtttaacaaaaacaactccaatcaagcagcagctgtaactttcacaaagtgtgaagaagaacctttaggtattgtatgacaatttgtgtg

SEQ ID NO: 1094 - DNA, 121 bp, Homo sapiens
cacacaaattgtcatacaatacctaaaggttcttcttcacactttgtgaaagttacagctgctgcttgattggagttgtttttgttaaactgatgaatctcattgtcattaatcttatttt

SEQ ID NO: 1095 - DNA, 17 bp, Homo sapiens
tcaagcagcagctgtaa

SEQ ID NO: 1096 - DNA, 17 bp, Homo sapiens
ttacagctgctgcttga

SEQ ID NO: 1097 - DNA, 121 bp, Homo sapiens
aggcaacgcgtctttccacagccaggcagtctgtatcttgcaaaaacatccactctgcctcgaatctctctgaaagcagcagtaggaggccaagtcccctctgcgtgtcctcataaacagg

SEQ ID NO: 1098 - DNA, 121 bp, Homo sapiens
cctgtttatgaggacacgcagaggggacttggcctcctactgctgctttcagagagattcgaggcagagtggatgtttttgcaagatacagactgcctggctgtggaaagacgcgttgcct

SEQ ID NO: 1099 - DNA, 17 bp, Homo sapiens
ctctgcctcgaatctct

SEQ ID NO: 1100 - DNA, 17 bp, Homo sapiens
agagattcgaggcagag

SEQ ID NO: 1101 - DNA, 121 bp, Homo sapiens
atttcattgagcgcaaatatatctgaaacttctagcaataaaactagtagtgcagatacccaaaaagtggccattattgaacttacagatgggtggtatgctgttaaggcccagttagatc

SEQ ID NO: 1102 - DNA, 121 bp, Homo sapiens
gatctaactgggccttaacagcataccacccatctgtaagttcaataatggccactttttgggtatctgcactactagttttattgctagaagtttcagatatatttgcgctcaatgaaat

SEQ ID NO: 1103 - DNA, 17 bp, Homo sapiens
cagatacccaaaaagtg

SEQ ID NO: 1104 - DNA, 17 bp, Homo sapiens
cactttttgggtatctg

SEQ ID NO: 1105 - DNA, 121 bp, Homo sapiens
cagaactggtgggctctcctgatgcctgtacacctcttgaagccccagaatctcttatgttaaaggtaaattaatttgcactcttggtaaaaatcagtcattgattcagttaaattctaga

SEQ ID NO: 1106 - DNA, 121 bp, Homo sapiens
tctagaatttaactgaatcaatgactgatttttaccaagagtgcaaattaatttacctttaacataagagattctggggcttcaagaggtgtacaggcatcaggagagcccaccagttctg

SEQ ID NO: 1107 - DNA, 17 bp, Homo sapiens
tcttatgttaaagattt

SEQ ID NO: 1108 - DNA, 17 bp, Homo sapiens
aaatctttaacataaga

SEQ ID NO: 1109 - DNA, 121 bp, Homo sapiens
ccttttgttttcttagaaaacacaacaaaaccatatttaccatcacgtgcactaacaagacagcaagttcgtgctttgcaagatggtgcagagctttatgaagcagtgaagaatgcagcag

SEQ ID NO: 1110 - DNA, 121 bp, Homo sapiens
ctgctgcattcttcactgcttcataaagctctgcaccatcttgcaaagcacgaacttgctgtcttgttagtgcacgtgatggtaaatatggttttgttgtgttttctaagaaaacaaaagg

SEQ ID NO: 1111 - DNA, 17 bp, Homo sapiens
taacaagacagcaagtt

SEQ ID NO: 1112 - DNA, 17 bp, Homo sapiens
aacttgctgtcttgtta

SEQ ID NO: 1113 - DNA, 121 bp, Homo sapiens
aatcacaggcaaatgttgaatgataagaaacaagctcagatccagttggaaattaggaaggccatggaatctgctgaacaaaaggaacaaggtttatcaagggatgtcacaaccgtgtgga

SEQ ID NO: 1114 - DNA, 121 bp, Homo sapiens
tccacacggttgtgacatcccttgataaaccttgttccttttgttcagcagattccatggccttcctaatttccaactggatctgagcttgtttcttatcattcaacatttgcctgtgatt

SEQ ID NO: 1115 - DNA, 17 bp, Homo sapiens
ttaggaaggccatggaa

SEQ ID NO: 1116 - DNA, 17 bp, Homo sapiens
ttccatggccttcctaa

SEQ ID NO: 1117 - DNA, 121 bp, Homo sapiens
acaatttactggcaataaagttttggatagaccttaatgaggacattattaagcctcatatgttaattgctgcaagcaacctccagtggcgaccagaatccaaatcaggccttcttacttt

SEQ ID NO: 1118 - DNA, 121 bp, Homo sapiens
aaagtaagaaggcctgatttggattctggtcgccactggaggttgcttgcagcaattaacatatgaggcttaataatgtcctcattaaggtctatccaaaactttattgccagtaaattgt

SEQ ID NO: 1119 - DNA, 17 bp, Homo sapiens
gcctcatatgttaattg

SEQ ID NO: 1120 - DNA, 17 bp, Homo sapiens
caattaacatatgaggc

SEQ ID NO: 1121 - DNA, 121 bp, Homo sapiens
gactgaaacgacgttgtactacatctctgatcaaagaacaggagagttcccaggccagtacggaagaatgtgagaaaaataagcaggacacaattacaactaaaaaatatatctaagcatt

SEQ ID NO: 1122 - DNA, 121 bp, Homo sapiens
aatgcttagatatattttttagttgtaattgtgtcctgcttatttttctcacattcttccgtactggcctgggaactctcctgttctttgatcagagatgtagtacaacgtcgtttcagtc

SEQ ID NO: 1123 - DNA, 17 bp, Homo sapiens
ggccagtacggaagaat

SEQ ID NO: 1124 - DNA, 17 bp, Homo sapiens
attcttccgtactggcc

SEQ ID NO: 1125 - DNA, 121 bp, Homo sapiens
aaagaacaggagagttcccaggccagtacggaagaatgtgagaaaaataagcaggacacaattacaactaaaaaatatatctaagcatttgcaaaggcgacaataaattattgacgcttaa

SEQ ID NO: 1126 - DNA, 121 bp, Homo sapiens
ttaagcgtcaataatttattgtcgcctttgcaaatgcttagatatattttttagttgtaattgtgtcctgcttatttttctcacattcttccgtactggcctgggaactctcctgttcttt

SEQ ID NO: 1127 - DNA, 17 bp, Homo sapiens
aggacacaattacaact

SEQ ID NO: 1128 - DNA, 17 bp, Homo sapiens
agttgtaattgtgtcct

SEQ ID NO: 1129 - DNA, 121 bp, Homo sapiens
aaggatacagacagcgcctggaattgtcagacatataccaaatcccttctgttgattctgctgacaatctatctgaaaaattggaaaggtatgttcatgtacattgtttagttgaagagag

SEQ ID NO: 1130 - DNA, 121 bp, Homo sapiens
ctctcttcaactaaacaatgtacatgaacatacctttccaatttttcagatagattgtcagcagaatcaacagaagggatttggtatatgtctgacaattccaggcgctgtctgtatcctt

SEQ ID NO: 1131 - DNA, 17 bp, Homo sapiens
tgattctgctgacaatc

SEQ ID NO: 1132 - DNA, 17 bp, Homo sapiens
gattgtcagcagaatca

SEQ ID NO: 1133 - DNA, 121 bp, Homo sapiens
agcgcctggaattgtcagacatataccaaatcccttctgttgattctgctgacaatctatctgaaaaattggaaaggtatgttcatgtacattgtttagttgaagagagaaattcatatta

SEQ ID NO: 1134 - DNA, 121 bp, Homo sapiens
taatatgaatttctctcttcaactaaacaatgtacatgaacatacctttccaatttttcagatagattgtcagcagaatcaacagaagggatttggtatatgtctgacaattccaggcgct

SEQ ID NO: 1135 - DNA, 17 bp, Homo sapiens
caatctatctgaaaaat

SEQ ID NO: 1136 - DNA, 17 bp, Homo sapiens
atttttcagatagattg

SEQ ID NO: 1137 - DNA, 121 bp, Homo sapiens
aggacaactaaaatatttgcacatgcaacttattggtcccactttttattcttttgcagagaatgggatagagagctggcttcaaagaaaaatcctaaactcattaatgcccttcggcgat

SEQ ID NO: 1138 - DNA, 121 bp, Homo sapiens
atcgccgaagggcattaatgagtttaggatttttctttgaagccagctctctatcccattctctgcaaaagaataaaaagtgggaccaataagttgcatgtgcaaatattttagttgtcct

SEQ ID NO: 1139 - DNA, 17 bp, Homo sapiens
tttgcagagaatgggat

SEQ ID NO: 1140 - DNA, 17 bp, Homo sapiens
atcccattctctgcaaa

SEQ ID NO: 1141 - DNA, 121 bp, Homo sapiens; identical to SEQ ID NO: 1137

SEQ ID NO: 1142 - DNA, 121 bp, Homo sapiens; identical to SEQ ID NO: 1138

SEQ ID NO: 1143 - DNA, 17 bp, Homo sapiens
tttgcagagaatgggat

SEQ ID NO: 1144 - DNA, 17 bp, Homo sapiens
atcccattctctgcaaa

SEQ ID NO: 1145 - DNA, 121 bp, Homo sapiens
aactaaaatatttgcacatgcaacttattggtcccactttttattcttttgcagagaatgggatagagagctggcttcaaagaaaaatcctaaactcattaatgcccttcggcgatgtttt

SEQ ID NO: 1146 - DNA, 121 bp, Homo sapiens
aaaacatcgccgaagggcattaatgagtttaggatttttctttgaagccagctctctatcccattctctgcaaaagaataaaaagtgggaccaataagttgcatgtgcaaatattttagtt

SEQ ID NO: 1147 - DNA, 17 bp, Homo sapiens
agagaatgggatagaga

SEQ ID NO: 1148 - DNA, 17 bp, Homo sapiens
tctctatcccattctct

SEQ ID NO: 1149 - DNA, 121 bp, Homo sapiens
actaaaatatttgcacatgcaacttattggtcccactttttattcttttgcagagaatgggatagagagctggcttcaaagaaaaatcctaaactcattaatgcccttcggcgatgttttt

SEQ ID NO: 1150 - DNA, 121 bp, Homo sapiens
aaaaacatcgccgaagggcattaatgagtttaggatttttctttgaagccagctctctatcccattctctgcaaaagaataaaaagtgggaccaataagttgcatgtgcaaatattttagt

SEQ ID NO: 1151 - DNA, 17 bp, Homo sapiens
gagaatgggatagagag

SEQ ID NO: 1152 - DNA, 17 bp, Homo sapiens
ctctctatcccattctc

SEQ ID NO: 1153 - DNA, 121 bp, Homo sapiens
atatttgcacatgcaacttattggtcccactttttattcttttgcagagaatgggatagagagctggcttcaaagaaaaatcctaaactcattaatgcccttcggcgatgttttttctgga

SEQ ID NO: 1154 - DNA, 121 bp, Homo sapiens
tccagaaaaaacatcgccgaagggcattaatgagtttaggatttttctttgaagccagctctctatcccattctctgcaaaagaataaaaagtgggaccaataagttgcatgtgcaaatat

SEQ ID NO: 1155 - DNA, 17 bp, Homo sapiens
gggatagagagctggct

SEQ ID NO: 1156 - DNA, 17 bp, Homo sapiens
agccagctctctatccc

SEQ ID NO: 1157 - DNA, 121 bp, Homo sapiens
ggtcccactttttattcttttgcagagaatgggatagagagctggcttcaaagaaaaatcctaaactcattaatgcccttcggcgatgttttttctggagatttatgttctatggaatctt

SEQ ID NO: 1158 - DNA, 121 bp, Homo sapiens
aagattccatagaacataaatctccagaaaaaacatcgccgaagggcattaatgagtttaggatttttctttgaagccagctctctatcccattctctgcaaaagaataaaaagtgggacc

SEQ ID NO: 1159 - DNA, 17 bp, Homo sapiens
gaaaaatcctaaactca

SEQ ID NO: 1160 - DNA, 17 bp, Homo sapiens
tgagtttaggatttttc

SEQ ID NO: 1161 - DNA, 121 bp, Homo sapiens
tgcagagaatgggatagagagctggcttcaaagaaaaatcctaaactcattaatgcccttcggcgatgttttttctggagatttatgttctatggaatctttttatatttaggggtaagga

SEQ ID NO: 1162 - DNA, 121 bp, Homo sapiens
tccttacccctaaatataaaaagattccatagaacataaatctccagaaaaaacatcgccgaagggcattaatgagtttaggatttttctttgaagccagctctctatcccattctctgca

SEQ ID NO: 1163 - DNA, 17 bp, Homo sapiens
atgcccttcggcgatgt

SEQ ID NO: 1164 - DNA, 17 bp, Homo sapiens
acatcgccgaagggcat

SEQ ID NO: 1165 - DNA, 121 bp, Homo sapiens
gagaatgggatagagagctggcttcaaagaaaaatcctaaactcattaatgcccttcggcgatgttttttctggagatttatgttctatggaatctttttatatttaggggtaaggatctc

SEQ ID NO: 1166 - DNA, 121 bp, Homo sapiens
gagatccttacccctaaatataaaaagattccatagaacataaatctccagaaaaaacatcgccgaagggcattaatgagtttaggatttttctttgaagccagctctctatcccattctc

SEQ ID NO: 1167 - DNA, 17 bp, Homo sapiens
ccttcggcgatgttttt

SEQ ID NO: 1168 - DNA, 17 bp, Homo sapiens
aaaaacatcgccgaagg

SEQ ID NO: 1169 - DNA, 121 bp, Homo sapiens; identical to SEQ ID NO: 1165

SEQ ID NO: 1170 - DNA, 121 bp, Homo sapiens; identical to SEQ ID NO: 1166

SEQ ID NO: 1171 - DNA, 17 bp, Homo sapiens
ccttcggcgatgttttt

SEQ ID NO: 1172 - DNA, 17 bp, Homo sapiens
aaaaacatcgccgaagg

SEQ ID NO: 1173 - DNA, 121 bp, Homo sapiens
agagaatgggatagagagctggcttcaaagaaaaatcctaaactcattaatgcccttcggcgatgttttttctggagatttatgttctatggaatctttttatatttaggggtaaggatct

SEQ ID NO: 1174 - DNA, 121 bp, Homo sapiens
agatccttacccctaaatataaaaagattccatagaacataaatctccagaaaaaacatcgccgaagggcattaatgagtttaggatttttctttgaagccagctctctatcccattctct

SEQ ID NO: 1175 - DNA, 17 bp, Homo sapiens
cccttcggcgatgtttt

SEQ ID NO: 1176 - DNA, 17 bp, Homo sapiens
aaaacatcgccgaaggg

SEQ ID NO: 1177 - DNA, 121 bp, Homo sapiens
aaaatcctaaactcattaatgcccttcggcgatgttttttctggagatttatgttctatggaatctttttatatttaggggtaaggatctcatttgtacattcattatgtatcacataact

SEQ ID NO: 1178 - DNA, 121 bp, Homo sapiens
agttatgtgatacataatgaatgtacaaatgagatccttacccctaaatataaaaagattccatagaacataaatctccagaaaaaacatcgccgaagggcattaatgagtttaggatttt

SEQ ID NO: 1179 - DNA, 17 bp, Homo sapiens
gttctatggaatctttt

SEQ ID NO: 1180 - DNA, 17 bp, Homo sapiens
aaaagattccatagaac

SEQ ID NO: 1181 - DNA, 121 bp, Homo sapiens; identical to SEQ ID NO: 1177

SEQ ID NO: 1182 - DNA, 121 bp, Homo sapiens; identical to SEQ ID NO: 1178

SEQ ID NO: 1183 - DNA, 17 bp, Homo sapiens
gttctatggaatctttt

SEQ ID NO: 1184 - DNA, 17 bp, Homo sapiens
aaaagattccatagaac

SEQ ID NO: 1185 - DNA, 121 bp, Homo sapiens
aactcattaatgcccttcggcgatgttttttctggagatttatgttctatggaatctttttatatttaggggtaaggatctcatttgtacattcattatgtatcacataactatatgcatt

SEQ ID NO: 1186 - DNA, 121 bp, Homo sapiens
aatgcatatagttatgtgatacataatgaatgtacaaatgagatccttacccctaaatataaaaagattccatagaacataaatctccagaaaaaacatcgccgaagggcattaatgagtt

SEQ ID NO: 1187 - DNA, 17 bp, Homo sapiens
aatctttttatatttag

SEQ ID NO: 1188 - DNA, 17 bp, Homo sapiens
ctaaatataaaaagatt

SEQ ID NO: 1189 - DNA, 121 bp, Homo sapiens
cctaaactcattaatgcccttcggcgatgttttttctggagatttatgttctatggaatctttttatatttaggggtaaggatctcatttgtacattcattatgtatcacataactatatg

SEQ ID NO: 1190 - DNA, 121 bp, Homo sapiens
catatagttatgtgatacataatgaatgtacaaatgagatccttacccctaaatataaaaagattccatagaacataaatctccagaaaaaacatcgccgaagggcattaatgagtttagg

SEQ ID NO: 1191 - DNA, 17 bp, Homo sapiens
atggaatctttttatat

SEQ ID NO: 1192 - DNA, 17 bp, Homo sapiens
atataaaaagattccat

SEQ ID NO: 1193 - DNA, 121 bp, Homo sapiens; identical to SEQ ID NO: 1185

SEQ ID NO: 1194 - DNA, 121 bp, Homo sapiens; identical to SEQ ID NO: 1186

SEQ ID NO: 1195 - DNA, 17 bp, Homo sapiens
aatctttttatatttag

SEQ ID NO: 1196 - DNA, 17 bp, Homo sapiens
ctaaatataaaaagatt

SEQ ID NO: 1197 - DNA, 121 bp, Homo sapiens; identical to SEQ ID NO: 1185

SEQ ID NO: 1198 - DNA, 121 bp, Homo sapiens; identical to SEQ ID NO: 1186

SEQ ID NO: 1199 - DNA, 17 bp, Homo sapiens
aatctttttatatttag

SEQ ID NO: 1200 - DNA, 17 bp, Homo sapiens
ctaaatataaaaagatt

SEQ ID NO: 1201 - DNA, 121 bp, Homo sapiens
aatgcccttcggcgatgttttttctggagatttatgttctatggaatctttttatatttaggggtaaggatctcatttgtacattcattatgtatcacataactatatgcatttttgtgat

SEQ ID NO: 1202 - DNA, 121 bp, Homo sapiens
atcacaaaaatgcatatagttatgtgatacataatgaatgtacaaatgagatccttacccctaaatataaaaagattccatagaacataaatctccagaaaaaacatcgccgaagggcatt

SEQ ID NO: 1203 - DNA, 17 bp, Homo sapiens
tatatttaggggtaagg

SEQ ID NO: 1204 - DNA, 17 bp, Homo sapiens
ccttacccctaaatata

SEQ ID NO: 1205 - DNA, 121 bp, Homo sapiens
aataaatgaaatttaatttctctgtttttccccttttgtaggaagtcaccaaagcagtacagcctctcttactgggaagaatcatagcttcctatgacccggataacaaggaggaacgctc

SEQ ID NO: 1206 - DNA, 121 bp, Homo sapiens
gagcgttcctccttgttatccgggtcataggaagctatgattcttcccagtaagagaggctgtactgctttggtgacttcctacaaaaggggaaaaacagagaaattaaatttcatttatt

SEQ ID NO: 1207 - DNA, 17 bp, Homo sapiens
agcagtacagcctctct

SEQ ID NO: 1208 - DNA, 17 bp, Homo sapiens
agagaggctgtactgct

SEQ ID NO: 1209 - DNA, 121 bp, Homo sapiens
aaataaatgaaatttaatttctctgtttttccccttttgtaggaagtcaccaaagcagtacagcctctcttactgggaagaatcatagcttcctatgacccggataacaaggaggaacgct

SEQ ID NO: 1210 - DNA, 121 bp, Homo sapiens
agcgttcctccttgttatccgggtcataggaagctatgattcttcccagtaagagaggctgtactgctttggtgacttcctacaaaaggggaaaaacagagaaattaaatttcatttattt

SEQ ID NO: 1211 - DNA, 17 bp, Homo sapiens
aagcagtacagcctctc

SEQ ID NO: 1212 - DNA, 17 bp, Homo sapiens
gagaggctgtactgctt

SEQ ID NO: 1213 - DNA, 121 bp, Homo sapiens
cccttttgtaggaagtcaccaaagcagtacagcctctcttactgggaagaatcatagcttcctatgacccggataacaaggaggaacgctctatcgcgatttatctaggcataggcttatg

SEQ ID NO: 1214 - DNA, 121 bp, Homo sapiens
cataagcctatgcctagataaatcgcgatagagcgttcctccttgttatccgggtcataggaagctatgattcttcccagtaagagaggctgtactgctttggtgacttcctacaaaaggg

SEQ ID NO: 1215 - DNA, 17 bp, Homo sapiens
catagcttcctatgacc

SEQ ID NO: 1216 - DNA, 17 bp, Homo sapiens
ggtcataggaagctatg

SEQ ID NO: 1217 - DNA, 121 bp, Homo sapiens
ttttgtaggaagtcaccaaagcagtacagcctctcttactgggaagaatcatagcttcctatgacccggataacaaggaggaacgctctatcgcgatttatctaggcataggcttatgcct

SEQ ID NO: 1218 - DNA, 121 bp, Homo sapiens
aggcataagcctatgcctagataaatcgcgatagagcgttcctccttgttatccgggtcataggaagctatgattcttcccagtaagagaggctgtactgctttggtgacttcctacaaaa

SEQ ID NO: 1219 - DNA, 17 bp, Homo sapiens
agcttcctatgacccgg

SEQ ID NO: 1220 - DNA, 17 bp, Homo sapiens
ccgggtcataggaagct

SEQ ID NO: 1221 - DNA, 121 bp, Homo sapiens
ttgtaggaagtcaccaaagcagtacagcctctcttactgggaagaatcatagcttcctatgacccggataacaaggaggaacgctctatcgcgatttatctaggcataggcttatgccttc

SEQ ID NO: 1222 - DNA, 121 bp, Homo sapiens
gaaggcataagcctatgcctagataaatcgcgatagagcgttcctccttgttatccgggtcataggaagctatgattcttcccagtaagagaggctgtactgctttggtgacttcctacaa

SEQ ID NO: 1223 - DNA, 17 bp, Homo sapiens
cttcctatgacccggat

SEQ ID NO: 1224 - DNA, 17 bp, Homo sapiens
atccgggtcataggaag

SEQ ID NO: 1225 - DNA, 121 bp, Homo sapiens
aggaagtcaccaaagcagtacagcctctcttactgggaagaatcatagcttcctatgacccggataacaaggaggaacgctctatcgcgatttatctaggcataggcttatgccttctctt

SEQ ID NO: 1226 - DNA, 121 bp, Homo sapiens
aagagaaggcataagcctatgcctagataaatcgcgatagagcgttcctccttgttatccgggtcataggaagctatgattcttcccagtaagagaggctgtactgctttggtgacttcct

SEQ ID NO: 1227 - DNA, 17 bp, Homo sapiens
ctatgacccggataaca

SEQ ID NO: 1228 - DNA, 17 bp, Homo sapiens
tgttatccgggtcatag

SEQ ID NO: 1229 - DNA, 121 bp, Homo sapiens
gtacagcctctcttactgggaagaatcatagcttcctatgacccggataacaaggaggaacgctctatcgcgatttatctaggcataggcttatgccttctctttattgtgaggacactgc

SEQ ID NO: 1230 - DNA, 121 bp, Homo sapiens
gcagtgtcctcacaataaagagaaggcataagcctatgcctagataaatcgcgatagagcgttcctccttgttatccgggtcataggaagctatgattcttcccagtaagagaggctgtac

SEQ ID NO: 1231 - DNA, 17 bp, Homo sapiens
aggaggaacgctctatc

SEQ ID NO: 1232 - DNA, 17 bp, Homo sapiens
gatagagcgttcctcct

SEQ ID NO: 1233 - DNA, 121 bp, Homo sapiens
tacagcctctcttactgggaagaatcatagcttcctatgacccggataacaaggaggaacgctctatcgcgatttatctaggcataggcttatgccttctctttattgtgaggacactgct

SEQ ID NO: 1234 - DNA, 121 bp, Homo sapiens
agcagtgtcctcacaataaagagaaggcataagcctatgcctagataaatcgcgatagagcgttcctccttgttatccgggtcataggaagctatgattcttcccagtaagagaggctgta

SEQ ID NO: 1235 - DNA, 17 bp, Homo sapiens
ggaggaacgctctatcg

SEQ ID NO: 1236 - DNA, 17 bp, Homo sapiens
cgatagagcgttcctcc

SEQ ID NO: 1237 - DNA, 121 bp, Homo sapiens; identical to SEQ ID NO: 1233

SEQ ID NO: 1238 - DNA, 121 bp, Homo sapiens; identical to SEQ ID NO: 1234

SEQ ID NO: 1239 - DNA, 17 bp, Homo sapiens
ggaggaacgctctatcg

SEQ ID NO: 1240 - DNA, 17 bp, Homo sapiens
cgatagagcgttcctcc

SEQ ID NO: 1241 - DNA, 121 bp, Homo sapiens; identical to SEQ ID NO: 1233

SEQ ID NO: 1242 - DNA, 121 bp, Homo sapiens; identical to SEQ ID NO: 1234

SEQ ID NO: 1243 - DNA, 17 bp, Homo sapiens
ggaggaacgctctatcg

SEQ ID NO: 1244 - DNA, 17 bp, Homo sapiens
cgatagagcgttcctcc

SEQ ID NO: 1245 - DNA, 121 bp, Homo sapiens
ctcttactgggaagaatcatagcttcctatgacccggataacaaggaggaacgctctatcgcgatttatctaggcataggcttatgccttctctttattgtgaggacactgctcctacacc

SEQ ID NO: 1246 - DNA, 121 bp, Homo sapiens
ggtgtaggagcagtgtcctcacaataaagagaaggcataagcctatgcctagataaatcgcgatagagcgttcctccttgttatccgggtcataggaagctatgattcttcccagtaagag

SEQ ID NO: 1247 - DNA, 17 bp, Homo sapiens
gctctatcgcgatttat

SEQ ID NO: 1248 - DNA, 17 bp, Homo sapiens
ataaatcgcgatagagc

SEQ ID NO: 1249 - DNA, 121 bp, Homo sapiens
gggaagaatcatagcttcctatgacccggataacaaggaggaacgctctatcgcgatttatctaggcataggcttatgccttctctttattgtgaggacactgctcctacacccagccatt

SEQ ID NO: 1250 - DNA, 121 bp, Homo sapiens
aatggctgggtgtaggagcagtgtcctcacaataaagagaaggcataagcctatgcctagataaatcgcgatagagcgttcctccttgttatccgggtcataggaagctatgattcttccc

SEQ ID NO: 1251 - DNA, 17 bp, Homo sapiens
gcgatttatctaggcat

SEQ ID NO: 1252 - DNA, 17 bp, Homo sapiens
atgcctagataaatcgc

SEQ ID NO: 1253 - DNA, 121 bp, Homo sapiens
tagcttcctatgacccggataacaaggaggaacgctctatcgcgatttatctaggcataggcttatgccttctctttattgtgaggacactgctcctacacccagccatttttggccttca

SEQ ID NO: 1254 - DNA, 121 bp, Homo sapiens
tgaaggccaaaaatggctgggtgtaggagcagtgtcctcacaataaagagaaggcataagcctatgcctagataaatcgcgatagagcgttcctccttgttatccgggtcataggaagcta

SEQ ID NO: 1255 - DNA, 17 bp, Homo sapiens
aggcataggcttatgcc

SEQ ID NO: 1256 - DNA, 17 bp, Homo sapiens
ggcataagcctatgcct

SEQ ID NO: 1257 - DNA, 121 bp, Homo sapiens
tcgcgatttatctaggcataggcttatgccttctctttattgtgaggacactgctcctacacccagccatttttggccttcatcacattggaatgcagatgagaatagctatgtttagttt

SEQ ID NO: 1258 - DNA, 121 bp, Homo sapiens
aaactaaacatagctattctcatctgcattccaatgtgatgaaggccaaaaatggctgggtgtaggagcagtgtcctcacaataaagagaaggcataagcctatgcctagataaatcgcga

SEQ ID NO: 1259 - DNA, 17 bp, Homo sapiens
gctcctacacccagcca

SEQ ID NO: 1260 - DNA, 17 bp, Homo sapiens
tggctgggtgtaggagc

SEQ ID NO: 1261 - DNA, 121 bp, Homo sapiens
tttatctaggcataggcttatgccttctctttattgtgaggacactgctcctacacccagccatttttggccttcatcacattggaatgcagatgagaatagctatgtttagtttgattta

SEQ ID NO: 1262 - DNA, 121 bp, Homo sapiens
taaatcaaactaaacatagctattctcatctgcattccaatgtgatgaaggccaaaaatggctgggtgtaggagcagtgtcctcacaataaagagaaggcataagcctatgcctagataaa

SEQ ID NO: 1263 - DNA, 17 bp, Homo sapiens
acacccagccatttttg

SEQ ID NO: 1264 - DNA, 17 bp, Homo sapiens
caaaaatggctgggtgt

SEQ ID NO: 1265 - DNA, 121 bp, Homo sapiens
gccttctctttattgtgaggacactgctcctacacccagccatttttggccttcatcacattggaatgcagatgagaatagctatgtttagtttgatttataagaaggtaatacttccttg

SEQ ID NO: 1266 - DNA, 121 bp, Homo sapiens
caaggaagtattaccttcttataaatcaaactaaacatagctattctcatctgcattccaatgtgatgaaggccaaaaatggctgggtgtaggagcagtgtcctcacaataaagagaaggc

SEQ ID NO: 1267 - DNA, 17 bp, Homo sapiens
tcatcacattggaatgc

SEQ ID NO: 1268 - DNA, 17 bp, Homo sapiens
gcattccaatgtgatga

SEQ ID NO: 1269 - DNA, 121 bp, Homo sapiens
cttctctttattgtgaggacactgctcctacacccagccatttttggccttcatcacattggaatgcagatgagaatagctatgtttagtttgatttataagaaggtaatacttccttgca

SEQ ID NO: 1270 - DNA, 121 bp, Homo sapiens
tgcaaggaagtattaccttcttataaatcaaactaaacatagctattctcatctgcattccaatgtgatgaaggccaaaaatggctgggtgtaggagcagtgtcctcacaataaagagaag

SEQ ID NO: 1271 - DNA, 17 bp, Homo sapiens
atcacattggaatgcag

SEQ ID NO: 1272 - DNA, 17 bp, Homo sapiens
ctgcattccaatgtgat

SEQ ID NO: 1273 - DNA, 121 bp, Homo sapiens
tttattgtgaggacactgctcctacacccagccatttttggccttcatcacattggaatgcagatgagaatagctatgtttagtttgatttataagaaggtaatacttccttgcacaggcc

SEQ ID NO: 1274 - DNA, 121 bp, Homo sapiens
ggcctgtgcaaggaagtattaccttcttataaatcaaactaaacatagctattctcatctgcattccaatgtgatgaaggccaaaaatggctgggtgtaggagcagtgtcctcacaataaa

SEQ ID NO: 1275 - DNA, 17 bp, Homo sapiens
ttggaatgcagatgaga

SEQ ID NO: 1276 - DNA, 17 bp, Homo sapiens
tctcatctgcattccaa

SEQ ID NO: 1277 - DNA, 121 bp, Homo sapiens
aatatatttgtattttgtttgttgaaattatctaactttccatttttcttttagactttaaagctgtcaagccgtgttctagataaaataagtattggacaacttgttagtctcctttcca

SEQ ID NO: 1278 - DNA, 121 bp, Homo sapiens
tggaaaggagactaacaagttgtccaatacttattttatctagaacacggcttgacagctttaaagtctaaaagaaaaatggaaagttagataatttcaacaaacaaaatacaaatatatt

SEQ ID NO: 1279 - DNA, 17 bp, Homo sapiens
agactttaaagctgtca

SEQ ID NO: 1280 - DNA, 17 bp, Homo sapiens
tgacagctttaaagtct

SEQ ID NO: 1281 - DNA, 121 bp, Homo sapiens
ttatctaactttccatttttcttttagactttaaagctgtcaagccgtgttctagataaaataagtattggacaacttgttagtctcctttccaacaacctgaacaaatttgatgaagtat

SEQ ID NO: 1282 - DNA, 121 bp, Homo sapiens
atacttcatcaaatttgttcaggttgttggaaaggagactaacaagttgtccaatacttattttatctagaacacggcttgacagctttaaagtctaaaagaaaaatggaaagttagataa

SEQ ID NO: 1283 - DNA, 17 bp, Homo sapiens
tagataaaataagtatt

SEQ ID NO: 1284 - DNA, 17 bp, Homo sapiens
aatacttattttatcta

SEQ ID NO: 1285 - DNA, 121 bp, Homo sapiens
tttccatttttcttttagactttaaagctgtcaagccgtgttctagataaaataagtattggacaacttgttagtctcctttccaacaacctgaacaaatttgatgaagtatgtacctatt

SEQ ID NO: 1286 - DNA, 121 bp, Homo sapiens
aataggtacatacttcatcaaatttgttcaggttgttggaaaggagactaacaagttgtccaatacttattttatctagaacacggcttgacagctttaaagtctaaaagaaaaatggaaa

SEQ ID NO: 1287 - DNA, 17 bp, Homo sapiens
taagtattggacaactt

SEQ ID NO: 1288 - DNA, 17 bp, Homo sapiens
aagttgtccaatactta

SEQ ID NO: 1289 - DNA, 121 bp, Homo sapiens
aagatacaatgacacctgtttttgctgtgcttttattttccagggacttgcattggcacatttcgtgtggatcgctcctttgcaagtggcactcctcatggggctaatctgggagttgtta

SEQ ID NO: 1290 - DNA, 121 bp, Homo sapiens
taacaactcccagattagccccatgaggagtgccacttgcaaaggagcgatccacacgaaatgtgccaatgcaagtccctggaaaataaaagcacagcaaaaacaggtgtcattgtatctt

SEQ ID NO: 1291 - DNA, 17 bp, Homo sapiens
ttggcacatttcgtgtg

SEQ ID NO: 1292 - DNA, 17 bp, Homo sapiens
cacacgaaatgtgccaa

SEQ ID NO: 1293 - DNA, 121 bp, Homo sapiens
ggaagatacaatgacacctgtttttgctgtgcttttattttccagggacttgcattggcacatttcgtgtggatcgctcctttgcaagtggcactcctcatggggctaatctgggagttgt

SEQ ID NO: 1294 - DNA, 121 bp, Homo sapiens
acaactcccagattagccccatgaggagtgccacttgcaaaggagcgatccacacgaaatgtgccaatgcaagtccctggaaaataaaagcacagcaaaaacaggtgtcattgtatcttcc

SEQ ID NO: 1295 - DNA, 17 bp, Homo sapiens
cattggcacatttcgtg

SEQ ID NO: 1296 - DNA, 17 bp, Homo sapiens
cacgaaatgtgccaatg

SEQ ID NO: 1297 - DNA, 121 bp, Homo sapiens
tgtttttgctgtgcttttattttccagggacttgcattggcacatttcgtgtggatcgctcctttgcaagtggcactcctcatggggctaatctgggagttgttacaggcgtctgccttct

SEQ ID NO: 1298 - DNA, 121 bp, Homo sapiens
agaaggcagacgcctgtaacaactcccagattagccccatgaggagtgccacttgcaaaggagcgatccacacgaaatgtgccaatgcaagtccctggaaaataaaagcacagcaaaaaca

SEQ ID NO: 1299 - DNA, 17 bp, Homo sapiens
ggatcgctcctttgcaa

SEQ ID NO: 1300 - DNA, 17 bp, Homo sapiens
ttgcaaaggagcgatcc

SEQ ID NO: 1301 - DNA, 121 bp, Homo sapiens
tttgctgtgcttttattttccagggacttgcattggcacatttcgtgtggatcgctcctttgcaagtggcactcctcatggggctaatctgggagttgttacaggcgtctgccttctgtgg

SEQ ID NO: 1302 - DNA, 121 bp, Homo sapiens
ccacagaaggcagacgcctgtaacaactcccagattagccccatgaggagtgccacttgcaaaggagcgatccacacgaaatgtgccaatgcaagtccctggaaaataaaagcacagcaaa

SEQ ID NO: 1303 - DNA, 17 bp, Homo sapiens
cgctcctttgcaagtgg

SEQ ID NO: 1304 - DNA, 17 bp, Homo sapiens
ccacttgcaaaggagcg

SEQ ID NO: 1305 - DNA, 121 bp, Homo sapiens
ttcgtgtggatcgctcctttgcaagtggcactcctcatggggctaatctgggagttgttacaggcgtctgccttctgtggacttggtttcctgatagtccttgccctttttcaggctgggc

SEQ ID NO: 1306 - DNA, 121 bp, Homo sapiens
gcccagcctgaaaaagggcaaggactatcaggaaaccaagtccacagaaggcagacgcctgtaacaactcccagattagccccatgaggagtgccacttgcaaaggagcgatccacacgaa

SEQ ID NO: 1307 - DNA, 17 bp, Homo sapiens
agttgttacaggcgtct

SEQ ID NO: 1308 - DNA, 17 bp, Homo sapiens
agacgcctgtaacaact

SEQ ID NO: 1309 - DNA, 121 bp, Homo sapiens
cctttgcaagtggcactcctcatggggctaatctgggagttgttacaggcgtctgccttctgtggacttggtttcctgatagtccttgccctttttcaggctgggctagggagaatgatga

SEQ ID NO: 1310 - DNA, 121 bp, Homo sapiens
tcatcattctccctagcccagcctgaaaaagggcaaggactatcaggaaaccaagtccacagaaggcagacgcctgtaacaactcccagattagccccatgaggagtgccacttgcaaagg

SEQ ID NO: 1311 - DNA, 17 bp, Homo sapiens
ctgccttctgtggactt

SEQ ID NO: 1312 - DNA, 17 bp, Homo sapiens
aagtccacagaaggcag

SEQ ID NO: 1313 - DNA, 121 bp, Homo sapiens
tggggctaatctgggagttgttacaggcgtctgccttctgtggacttggtttcctgatagtccttgccctttttcaggctgggctagggagaatgatgatgaagtacaggtagcaacctat

SEQ ID NO: 1314 - DNA, 121 bp, Homo sapiens
ataggttgctacctgtacttcatcatcattctccctagcccagcctgaaaaagggcaaggactatcaggaaaccaagtccacagaaggcagacgcctgtaacaactcccagattagcccca

SEQ ID NO: 1315 - DNA, 17 bp, Homo sapiens
cctgatagtccttgccc

SEQ ID NO: 1316 - DNA, 17 bp, Homo sapiens
gggcaaggactatcagg

SEQ ID NO: 1317 - DNA, 121 bp, Homo sapiens
gttacaggcgtctgccttctgtggacttggtttcctgatagtccttgccctttttcaggctgggctagggagaatgatgatgaagtacaggtagcaacctattttcataacttgaaagttt

SEQ ID NO: 1318 - DNA, 121 bp, Homo sapiens
aaactttcaagttatgaaaataggttgctacctgtacttcatcatcattctccctagcccagcctgaaaaagggcaaggactatcaggaaaccaagtccacagaaggcagacgcctgtaac

SEQ ID NO: 1319 - DNA, 17 bp, Homo sapiens
tttcaggctgggctagg

SEQ ID NO: 1320 - DNA, 17 bp, Homo sapiens
cctagcccagcctgaaa

SEQ ID NO: 1321 - DNA, 121 bp, Homo sapiens
gggcggcggggagcagcatggagccggcggcggggagcagcatggagccttcggctgactggctggccacggccgcggcccggggtcgggtagaggaggtgcgggcgctgctggaggcggg

SEQ ID NO: 1322 - DNA, 121 bp, Homo sapiens
cccgcctccagcagcgcccgcacctcctctacccgaccccgggccgcggccgtggccagccagtcagccgaaggctccatgctgctccccgccgccggctccatgctgctccccgccgccc

SEQ ID NO: 1323 - DNA, 17 bp, Homo sapiens
ggctgactggctggcca

SEQ ID NO: 1324 - DNA, 17 bp, Homo sapiens
tggccagccagtcagcc

SEQ ID NO: 1325 - DNA, 121 bp, Homo sapiens
cggcggggagcagcatggagccggcggcggggagcagcatggagccttcggctgactggctggccacggccgcggcccggggtcgggtagaggaggtgcgggcgctgctggaggcgggggc

SEQ ID NO: 1326 - DNA, 121 bp, Homo sapiens
gcccccgcctccagcagcgcccgcacctcctctacccgaccccgggccgcggccgtggccagccagtcagccgaaggctccatgctgctccccgccgccggctccatgctgctccccgccg

SEQ ID NO: 1327 - DNA, 17 bp, Homo sapiens
tgactggctggccacgg

SEQ ID NO: 1328 - DNA, 17 bp, Homo sapiens
ccgtggccagccagtca

SEQ ID NO: 1329 - DNA, 121 bp, Homo sapiens
cggcggcggggagcagcatggagccttcggctgactggctggccacggccgcggcccggggtcgggtagaggaggtgcgggcgctgctggaggcgggggcgctgcccaacgcaccgaatag

SEQ ID NO: 1330 - DNA, 121 bp, Homo sapiens
ctattcggtgcgttgggcagcgcccccgcctccagcagcgcccgcacctcctctacccgaccccgggccgcggccgtggccagccagtcagccgaaggctccatgctgctccccgccgccg

SEQ ID NO: 1331 - DNA, 17 bp, Homo sapiens
ggcccggggtcgggtag

SEQ ID NO: 1332 - DNA, 17 bp, Homo sapiens
ctacccgaccccgggcc

SEQ ID NO: 1333 - DNA, 121 bp, Homo sapiens
cggcggggagcagcatggagccttcggctgactggctggccacggccgcggcccggggtcgggtagaggaggtgcgggcgctgctggaggcgggggcgctgcccaacgcaccgaatagtta

SEQ ID NO: 1334 - DNA, 121 bp, Homo sapiens
taactattcggtgcgttgggcagcgcccccgcctccagcagcgcccgcacctcctctacccgaccccgggccgcggccgtggccagccagtcagccgaaggctccatgctgctccccgccg

SEQ ID NO: 1335 - DNA, 17 bp, Homo sapiens
ccggggtcgggtagagg

SEQ ID NO: 1336 - DNA, 17 bp, Homo sapiens
cctctacccgaccccgg

SEQ ID NO: 1337 - DNA, 121 bp, Homo sapiens
cggctgactggctggccacggccgcggcccggggtcgggtagaggaggtgcgggcgctgctggaggcgggggcgctgcccaacgcaccgaatagttacggtcggaggccgatccaggtggg

SEQ ID NO: 1338 - DNA, 121 bp, Homo sapiens
cccacctggatcggcctccgaccgtaactattcggtgcgttgggcagcgcccccgcctccagcagcgcccgcacctcctctacccgaccccgggccgcggccgtggccagccagtcagccg

SEQ ID NO: 1339 - DNA, 17 bp, Homo sapiens
ggcgctgctggaggcgg

SEQ ID NO: 1340 - DNA, 17 bp, Homo sapiens
ccgcctccagcagcgcc

SEQ ID NO: 1341 - DNA, 121 bp, Homo sapiens
ggctggccacggccgcggcccggggtcgggtagaggaggtgcgggcgctgctggaggcgggggcgctgcccaacgcaccgaatagttacggtcggaggccgatccaggtgggtagagggtc

SEQ ID NO: 1342 - DNA, 121 bp, Homo sapiens
gaccctctacccacctggatcggcctccgaccgtaactattcggtgcgttgggcagcgcccccgcctccagcagcgcccgcacctcctctacccgaccccgggccgcggccgtggccagcc

SEQ ID NO: 1343 - DNA, 17 bp, Homo sapiens
ggaggcgggggcgctgc

SEQ ID NO: 1344 - DNA, 17 bp, Homo sapiens
gcagcgcccccgcctcc

SEQ ID NO: 1345 - DNA, 121 bp, Homo sapiens
ggtagaggaggtgcgggcgctgctggaggcgggggcgctgcccaacgcaccgaatagttacggtcggaggccgatccaggtgggtagagggtctgcagcgggagcaggggatggcgggcga

SEQ ID NO: 1346 - DNA, 121 bp, Homo sapiens
tcgcccgccatcccctgctcccgctgcagaccctctacccacctggatcggcctccgaccgtaactattcggtgcgttgggcagcgcccccgcctccagcagcgcccgcacctcctctacc

SEQ ID NO: 1347 - DNA, 17 bp, Homo sapiens
aatagttacggtcggag

SEQ ID NO: 1348 - DNA, 17 bp, Homo sapiens
ctccgaccgtaactatt

SEQ ID NO: 1349 - DNA, 121 bp, Homo sapiens
tctcccatacctgcccccaccctggctctgaccactctgctctctctggcaggtcatgatgatgggcagcgcccgcgtggcggagctgctgctgctccacggcgcggagcccaactgcgca

SEQ ID NO: 1350 - DNA, 121 bp, Homo sapiens
tgcgcagttgggctccgcgccgtggagcagcagcagctccgccacgcgggcgctgcccatcatcatgacctgccagagagagcagagtggtcagagccagggtgggggcaggtatgggaga

SEQ ID NO: 1351 - DNA, 17 bp, Homo sapiens
gtcatgatgatgggcag

SEQ ID NO: 1352 - DNA, 17 bp, Homo sapiens
ctgcccatcatcatgac

SEQ ID NO: 1353 - DNA, 121 bp, Homo sapiens
cccatacctgcccccaccctggctctgaccactctgctctctctggcaggtcatgatgatgggcagcgcccgcgtggcggagctgctgctgctccacggcgcggagcccaactgcgcagac

SEQ ID NO: 1354 - DNA, 121 bp, Homo sapiens
gtctgcgcagttgggctccgcgccgtggagcagcagcagctccgccacgcgggcgctgcccatcatcatgacctgccagagagagcagagtggtcagagccagggtgggggcaggtatggg

SEQ ID NO: 1355 - DNA, 17 bp, Homo sapiens
atgatgatgggcagcgc

SEQ ID NO: 1356 - DNA, 17 bp, Homo sapiens
gcgctgcccatcatcat

SEQ ID NO: 1357 - DNA, 121 bp, Homo sapiens
gccggcccccaccctggctctgaccattctgttctctctggcaggtcatgatgatgggcagcgcccgagtggcggagctgctgctgctccacggcgcggagcccaactgcgccgaccccgc

SEQ ID NO: 1358 - DNA, 121 bp, Homo sapiens
gcggggtcggcgcagttgggctccgcgccgtggagcagcagcagctccgccactcgggcgctgcccatcatcatgacctgccagagagaacagaatggtcagagccagggtgggggccggc

SEQ ID NO: 1359 - DNA, 17 bp, Homo sapiens
gatgggcagcgcccgag

SEQ ID NO: 1360 - DNA, 17 bp, Homo sapiens
ctcgggcgctgcccatc

SEQ ID NO: 1361 - DNA, 121 bp, Homo sapiens
ggcccccaccctggctctgaccattctgttctctctggcaggtcatgatgatgggcagcgcccgagtggcggagctgctgctgctccacggcgcggagcccaactgcgccgaccccgccac

SEQ ID NO: 1362 - DNA, 121 bp, Homo sapiens
gtggcggggtcggcgcagttgggctccgcgccgtggagcagcagcagctccgccactcgggcgctgcccatcatcatgacctgccagagagaacagaatggtcagagccagggtgggggcc

SEQ ID NO: 1363 - DNA, 17 bp, Homo sapiens
gggcagcgcccgagtgg

SEQ ID NO: 1364 - DNA, 17 bp, Homo sapiens
ccactcgggcgctgccc

SEQ ID NO: 1365 - DNA, 121 bp, Homo sapiens
cccccaccctggctctgaccattctgttctctctggcaggtcatgatgatgggcagcgcccgagtggcggagctgctgctgctccacggcgcggagcccaactgcgccgaccccgccactc

SEQ ID NO: 1366 - DNA, 121 bp, Homo sapiens
gagtggcggggtcggcgcagttgggctccgcgccgtggagcagcagcagctccgccactcgggcgctgcccatcatcatgacctgccagagagaacagaatggtcagagccagggtggggg

SEQ ID NO: 1367 - DNA, 17 bp, Homo sapiens
gcagcgcccgagtggcg

SEQ ID NO: 1368 - DNA, 17 bp, Homo sapiens
cgccactcgggcgctgc

SEQ ID NO: 1369 - DNA, 121 bp, Homo sapiens
caccctggctctgaccattctgttctctctggcaggtcatgatgatgggcagcgcccgagtggcggagctgctgctgctccacggcgcggagcccaactgcgccgaccccgccactctcac

SEQ ID NO: 1370 - DNA, 121 bp, Homo sapiens
gtgagagtggcggggtcggcgcagttgggctccgcgccgtggagcagcagcagctccgccactcgggcgctgcccatcatcatgacctgccagagagaacagaatggtcagagccagggtg

SEQ ID NO: 1371 - DNA, 17 bp, Homo sapiens
cgcccgagtggcggagc

SEQ ID NO: 1372 - DNA, 17 bp, Homo sapiens
gctccgccactcgggcg

SEQ ID NO: 1373 - DNA, 121 bp, Homo sapiens
tctgaccactctgctctctctggcaggtcatgatgatgggcagcgcccgcgtggcggagctgctgctgctccacggcgcggagcccaactgcgcagaccctgccactctcacccgaccggt

SEQ ID NO: 1374 - DNA, 121 bp, Homo sapiens
accggtcgggtgagagtggcagggtctgcgcagttgggctccgcgccgtggagcagcagcagctccgccacgcgggcgctgcccatcatcatgacctgccagagagagcagagtggtcaga

SEQ ID NO: 1375 - DNA, 17 bp, Homo sapiens
ggcggagctgctgctgc

SEQ ID NO: 1376 - DNA, 17 bp, Homo sapiens
gcagcagcagctccgcc

SEQ ID NO: 1377 - DNA, 121 bp, Homo sapiens
tctggcaggtcatgatgatgggcagcgcccgcgtggcggagctgctgctgctccacggcgcggagcccaactgcgcagaccctgccactctcacccgaccggtgcatgatgctgcccggga

SEQ ID NO: 1378 - DNA, 121 bp, Homo sapiens
tcccgggcagcatcatgcaccggtcgggtgagagtggcagggtctgcgcagttgggctccgcgccgtggagcagcagcagctccgccacgcgggcgctgcccatcatcatgacctgccaga

SEQ ID NO: 1379 - DNA, 17 bp, Homo sapiens
ccacggcgcggagccca

SEQ ID NO: 1380 - DNA, 17 bp, Homo sapiens
tgggctccgcgccgtgg

SEQ ID NO: 1381 - DNA, 121 bp, Homo sapiens
catgatgatgggcagcgcccgagtggcggagctgctgctgctccacggcgcggagcccaactgcgccgaccccgccactctcacccgacccgtgcacgacgctgcccgggagggcttcctg

SEQ ID NO: 1382 - DNA, 121 bp, Homo sapiens
caggaagccctcccgggcagcgtcgtgcacgggtcgggtgagagtggcggggtcggcgcagttgggctccgcgccgtggagcagcagcagctccgccactcgggcgctgcccatcatcatg

SEQ ID NO: 1383 - DNA, 17 bp, Homo sapiens
gagcccaactgcgccga

SEQ ID NO: 1384 - DNA, 17 bp, Homo sapiens
tcggcgcagttgggctc

SEQ ID NO: 1385 - DNA, 121 bp, Homo sapiens
tcatgatgatgggcagcgcccgagtggcggagctgctgctgctccacggcgcggagcccaactgcgccgaccccgccactctcacccgacccgtgcacgacgctgcccgggagggcttcct

SEQ ID NO: 1386 - DNA, 121 bp, Homo sapiens
aggaagccctcccgggcagcgtcgtgcacgggtcgggtgagagtggcggggtcggcgcagttgggctccgcgccgtggagcagcagcagctccgccactcgggcgctgcccatcatcatga

SEQ ID NO: 1387 - DNA, 17 bp, Homo sapiens
ggagcccaactgcgccg

SEQ ID NO: 1388 - DNA, 17 bp, Homo sapiens
cggcgcagttgggctcc

SEQ ID NO: 1389 - DNA, 121 bp, Homo sapiens
agctgctgctgctccacggcgcggagcccaactgcgccgaccccgccactctcacccgacccgtgcacgacgctgcccgggagggcttcctggacacgctggtggtgctgcaccgggccgg

SEQ ID NO: 1390 - DNA, 121 bp, Homo sapiens
ccggcccggtgcagcaccaccagcgtgtccaggaagccctcccgggcagcgtcgtgcacgggtcgggtgagagtggcggggtcggcgcagttgggctccgcgccgtggagcagcagcagct

SEQ ID NO: 1391 - DNA, 17 bp, Homo sapiens
cacccgacccgtgcacg

SEQ ID NO: 1392 - DNA, 17 bp, Homo sapiens
cgtgcacgggtcgggtg

SEQ ID NO: 1393 - DNA, 121 bp, Homo sapiens
ctgctccacggcgcggagcccaactgcgccgaccccgccactctcacccgacccgtgcacgacgctgcccgggagggcttcctggacacgctggtggtgctgcaccgggccggggcgcggc

SEQ ID NO: 1394 - DNA, 121 bp, Homo sapiens
gccgcgccccggcccggtgcagcaccaccagcgtgtccaggaagccctcccgggcagcgtcgtgcacgggtcgggtgagagtggcggggtcggcgcagttgggctccgcgccgtggagcag

SEQ ID NO: 1395 - DNA, 17 bp, Homo sapiens
ccgtgcacgacgctgcc

SEQ ID NO: 1396 - DNA, 17 bp, Homo sapiens
ggcagcgtcgtgcacgg

SEQ ID NO: 1397 - DNA, 121 bp, Homo sapiens
ctccacggcgcggagcccaactgcgccgaccccgccactctcacccgacccgtgcacgacgctgcccgggagggcttcctggacacgctggtggtgctgcaccgggccggggcgcggctgg

SEQ ID NO: 1398 - DNA, 121 bp, Homo sapiens
ccagccgcgccccggcccggtgcagcaccaccagcgtgtccaggaagccctcccgggcagcgtcgtgcacgggtcgggtgagagtggcggggtcggcgcagttgggctccgcgccgtggag

SEQ ID NO: 1399 - DNA, 17 bp, Homo sapiens
tgcacgacgctgcccgg

SEQ ID NO: 1400 - DNA, 17 bp, Homo sapiens
ccgggcagcgtcgtgca

SEQ ID NO: 1401 - DNA, 121 bp, Homo sapiens
gcgcggagcccaactgcgccgaccccgccactctcacccgacccgtgcacgacgctgcccgggagggcttcctggacacgctggtggtgctgcaccgggccggggcgcggctggacgtgcg

SEQ ID NO: 1402 - DNA, 121 bp, Homo sapiens
cgcacgtccagccgcgccccggcccggtgcagcaccaccagcgtgtccaggaagccctcccgggcagcgtcgtgcacgggtcgggtgagagtggcggggtcggcgcagttgggctccgcgc

SEQ ID NO: 1403 - DNA, 17 bp, Homo sapiens
cgctgcccgggagggct

SEQ ID NO: 1404 - DNA, 17 bp, Homo sapiens
agccctcccgggcagcg

SEQ ID NO: 1405 - DNA, 121 bp, Homo sapiens
ggcgcggagcccaactgcgccgaccccgccactctcacccgacccgtgcacgacgctgcccgggagggcttcctggacacgctggtggtgctgcaccgggccggggcgcggctggacgtgc

SEQ ID NO: 1406 - DNA, 121 bp, Homo sapiens
gcacgtccagccgcgccccggcccggtgcagcaccaccagcgtgtccaggaagccctcccgggcagcgtcgtgcacgggtcgggtgagagtggcggggtcggcgcagttgggctccgcgcc

SEQ ID NO: 1407 - DNA, 17 bp, Homo sapiens
acgctgcccgggagggc

SEQ ID NO: 1408 - DNA, 17 bp, Homo sapiens
gccctcccgggcagcgt

SEQ ID NO: 1409 - DNA, 121 bp, Homo sapiens
ctctcacccgaccggtgcatgatgctgcccgggagggcttcctggacacgctggtggtgctgcaccgggccggggcgcggctggacgtgcgcgatgcctggggtcgtctgcccgtggactt

SEQ ID NO: 1410 - DNA, 121 bp, Homo sapiens
aagtccacgggcagacgaccccaggcatcgcgcacgtccagccgcgccccggcccggtgcagcaccaccagcgtgtccaggaagccctcccgggcagcatcatgcaccggtcgggtgagag

SEQ ID NO: 1411 - DNA, 17 bp, Homo sapiens
ggtggtgctgcaccggg

SEQ ID NO: 1412 - DNA, 17 bp, Homo sapiens
cccggtgcagcaccacc

SEQ ID NO: 1413 - DNA, 121 bp, Homo sapiens
cccgaccggtgcatgatgctgcccgggagggcttcctggacacgctggtggtgctgcaccgggccggggcgcggctggacgtgcgcgatgcctggggtcgtctgcccgtggacttggccga

SEQ ID NO: 1414 - DNA, 121 bp, Homo sapiens
tcggccaagtccacgggcagacgaccccaggcatcgcgcacgtccagccgcgccccggcccggtgcagcaccaccagcgtgtccaggaagccctcccgggcagcatcatgcaccggtcggg

SEQ ID NO: 1415 - DNA, 17 bp, Homo sapiens
gctgcaccgggccgggg

SEQ ID NO: 1416 - DNA, 17 bp, Homo sapiens
ccccggcccggtgcagc

SEQ ID NO: 1417 - DNA, 121 bp, Homo sapiens
ccggtgcatgatgctgcccgggagggcttcctggacacgctggtggtgctgcaccgggccggggcgcggctggacgtgcgcgatgcctggggtcgtctgcccgtggacttggccgaggagc

SEQ ID NO: 1418 - DNA, 121 bp, Homo sapiens
gctcctcggccaagtccacgggcagacgaccccaggcatcgcgcacgtccagccgcgccccggcccggtgcagcaccaccagcgtgtccaggaagccctcccgggcagcatcatgcaccgg

SEQ ID NO: 1419 - DNA, 17 bp, Homo sapiens
accgggccggggcgcgg

SEQ ID NO: 1420 - DNA, 17 bp, Homo sapiens
ccgcgccccggcccggt

SEQ ID NO: 1421 - DNA, 121 bp, Homo sapiens
cgggagggcttcctggacacgctggtggtgctgcaccgggccggggcgcggctggacgtgcgcgatgcctggggtcgtctgcccgtggacttggccgaggagcggggccaccgcgacgttg

SEQ ID NO: 1422 - DNA, 121 bp, Homo sapiens
caacgtcgcggtggccccgctcctcggccaagtccacgggcagacgaccccaggcatcgcgcacgtccagccgcgccccggcccggtgcagcaccaccagcgtgtccaggaagccctcccg

SEQ ID NO: 1423 - DNA, 17 bp, Homo sapiens
tggacgtgcgcgatgcc

SEQ ID NO: 1424 - DNA, 17 bp, Homo sapiens
ggcatcgcgcacgtcca

SEQ ID NO: 1425 - DNA, 121 bp, Homo sapiens
caccgggccggggcgcggctggacgtgcgcgatgcctggggccgtctgcccgtggacctggctgaggagctgggccatcgcgatgtcgcacggtacctgcgcgcggctgcggggggcacca

SEQ ID NO: 1426 - DNA, 121 bp, Homo sapiens
tggtgccccccgcagccgcgcgcaggtaccgtgcgacatcgcgatggcccagctcctcagccaggtccacgggcagacggccccaggcatcgcgcacgtccagccgcgccccggcccggtg

SEQ ID NO: 1427 - DNA, 17 bp, Homo sapiens
tggacctggctgaggag

SEQ ID NO: 1428 - DNA, 17 bp, Homo sapiens
ctcctcagccaggtcca

SEQ ID NO: 1429 - DNA, 121 bp, Homo sapiens
tgcgcgatgcctggggccgtctgcccgtggacctggctgaggagctgggccatcgcgatgtcgcacggtacctgcgcgcggctgcggggggcaccagaggcagtaaccatgcccgcataga

SEQ ID NO: 1430 - DNA, 121 bp, Homo sapiens
tctatgcgggcatggttactgcctctggtgccccccgcagccgcgcgcaggtaccgtgcgacatcgcgatggcccagctcctcagccaggtccacgggcagacggccccaggcatcgcgca

SEQ ID NO: 1431 - DNA, 17 bp, Homo sapiens
tcgcgatgtcgcacggt

SEQ ID NO: 1432 - DNA, 17 bp, Homo sapiens
accgtgcgacatcgcga

SEQ ID NO: 1433 - DNA, 121 bp, Homo sapiens
ggatctgtatcaagccgttctggagagtgcagtcctgttcctatgggttcatttccaagaagagggtttgtaaatggaagcagagaaagtactggatatttagaagaacttgagaaagaga

SEQ ID NO: 1434 - DNA, 121 bp, Homo sapiens
tctctttctcaagttcttctaaatatccagtactttctctgcttccatttacaaaccctcttcttggaaatgaacccataggaacaggactgcactctccagaacggcttgatacagatcc

SEQ ID NO: 1435 - DNA, 17 bp, Homo sapiens
ttccaagaagagggttt

SEQ ID NO: 1436 - DNA, 17 bp, Homo sapiens
aaaccctcttcttggaa

SEQ ID NO: 1437 - DNA, 121 bp, Homo sapiens
aaaaaaaaaataggtcattgcttcttgctgatcttgacaaagaagaaaaggaaaaagactggtattacgctcaacttcagaatctcactaaaagaatagatagtcttcctttaactgaaaa

SEQ ID NO: 1438 - DNA, 121 bp, Homo sapiens
ttttcagttaaaggaagactatctattcttttagtgagattctgaagttgagcgtaataccagtctttttccttttcttctttgtcaagatcagcaagaagcaatgacctatttttttttt

SEQ ID NO: 1439 - DNA, 17 bp, Homo sapiens
aaaagactggtattacg

SEQ ID NO: 1440 - DNA, 17 bp, Homo sapiens
cgtaataccagtctttt

SEQ ID NO: 1441 - DNA, 121 bp, Homo sapiens
aaataggtcattgcttcttgctgatcttgacaaagaagaaaaggaaaaagactggtattacgctcaacttcagaatctcactaaaagaatagatagtcttcctttaactgaaaatgtaagt

SEQ ID NO: 1442 - DNA, 121 bp, Homo sapiens
acttacattttcagttaaaggaagactatctattcttttagtgagattctgaagttgagcgtaataccagtctttttccttttcttctttgtcaagatcagcaagaagcaatgacctattt

SEQ ID NO: 1443 - DNA, 17 bp, Homo sapiens
tggtattacgctcaact

SEQ ID NO: 1444 - DNA, 17 bp, Homo sapiens
agttgagcgtaatacca

SEQ ID NO: 1445 - DNA, 121 bp, Homo sapiens
ttgcttcttgctgatcttgacaaagaagaaaaggaaaaagactggtattacgctcaacttcagaatctcactaaaagaatagatagtcttcctttaactgaaaatgtaagtaactggcagt

SEQ ID NO: 1446 - DNA, 121 bp, Homo sapiens
actgccagttacttacattttcagttaaaggaagactatctattcttttagtgagattctgaagttgagcgtaataccagtctttttccttttcttctttgtcaagatcagcaagaagcaa

SEQ ID NO: 1447 - DNA, 17 bp, Homo sapiens
ctcaacttcagaatctc

SEQ ID NO: 1448 - DNA, 17 bp, Homo sapiens
gagattctgaagttgag

SEQ ID NO: 1449 - DNA, 121 bp, Homo sapiens
cttgacaaagaagaaaaggaaaaagactggtattacgctcaacttcagaatctcactaaaagaatagatagtcttcctttaactgaaaatgtaagtaactggcagtacaacttatttgaaa

SEQ ID NO: 1450 - DNA, 121 bp, Homo sapiens
tttcaaataagttgtactgccagttacttacattttcagttaaaggaagactatctattcttttagtgagattctgaagttgagcgtaataccagtctttttccttttcttctttgtcaag

SEQ ID NO: 1451 - DNA, 17 bp, Homo sapiens
tcactaaaagaatagat

SEQ ID NO: 1452 - DNA, 17 bp, Homo sapiens
atctattcttttagtga

SEQ ID NO: 1453 - DNA, 121 bp, Homo sapiens
aagaaaaggaaaaagactggtattacgctcaacttcagaatctcactaaaagaatagatagtcttcctttaactgaaaatgtaagtaactggcagtacaacttatttgaaactttaataac

SEQ ID NO: 1454 - DNA, 121 bp, Homo sapiens
gttattaaagtttcaaataagttgtactgccagttacttacattttcagttaaaggaagactatctattcttttagtgagattctgaagttgagcgtaataccagtctttttccttttctt

SEQ ID NO: 1455 - DNA, 17 bp, Homo sapiens
aatagatagtcttcctt

SEQ ID NO: 1456 - DNA, 17 bp, Homo sapiens
aaggaagactatctatt

SEQ ID NO: 1457 - DNA, 121 bp, Homo sapiens
gattaacgtaaatacaagatattgatacttttttattatttgtggttttagttttccttacaaacagatatgaccagaaggcaattggaatatgaagcaaggcaaatcagagttgcgatgg

SEQ ID NO: 1458 - DNA, 121 bp, Homo sapiens
ccatcgcaactctgatttgccttgcttcatattccaattgccttctggtcatatctgtttgtaaggaaaactaaaaccacaaataataaaaaagtatcaatatcttgtatttacgttaatc

SEQ ID NO: 1459 - DNA, 17 bp, Homo sapiens
tttccttacaaacagat

SEQ ID NO: 1460 - DNA, 17 bp, Homo sapiens
atctgtttgtaaggaaa

SEQ ID NO: 1461 - DNA, 121 bp, Homo sapiens
cttttttattatttgtggttttagttttccttacaaacagatatgaccagaaggcaattggaatatgaagcaaggcaaatcagagttgcgatggaagaacaactaggtacctgccaggata

SEQ ID NO: 1462 - DNA, 121 bp, Homo sapiens
tatcctggcaggtacctagttgttcttccatcgcaactctgatttgccttgcttcatattccaattgccttctggtcatatctgtttgtaaggaaaactaaaaccacaaataataaaaaag

SEQ ID NO: 1463 - DNA, 17 bp, Homo sapiens
ggcaattggaatatgaa

SEQ ID NO: 1464 - DNA, 17 bp, Homo sapiens
ttcatattccaattgcc

SEQ ID NO: 1465 - DNA, 121 bp, Homo sapiens
caattggaatatgaagcaaggcaaatcagagttgcgatggaagaacaactaggtacctgccaggatatggaaaaacgagcacaggtaagttacttgtttctaagtgataaaacagcgaaga

SEQ ID NO: 1466 - DNA, 121 bp, Homo sapiens
tcttcgctgttttatcacttagaaacaagtaacttacctgtgctcgtttttccatatcctggcaggtacctagttgttcttccatcgcaactctgatttgccttgcttcatattccaattg

SEQ ID NO: 1467 - DNA, 17 bp, Homo sapiens
gtacctgccaggatatg

SEQ ID NO: 1468 - DNA, 17 bp, Homo sapiens
catatcctggcaggtac

SEQ ID NO: 1469 - DNA, 121 bp, Homo sapiens
gcaaggcaaatcagagttgcgatggaagaacaactaggtacctgccaggatatggaaaaacgagcacaggtaagttacttgtttctaagtgataaaacagcgaagagctattaggaataaa

SEQ ID NO: 1470 - DNA, 121 bp, Homo sapiens
tttattcctaatagctcttcgctgttttatcacttagaaacaagtaacttacctgtgctcgtttttccatatcctggcaggtacctagttgttcttccatcgcaactctgatttgccttgc

SEQ ID NO: 1471 - DNA, 17 bp, Homo sapiens
tggaaaaacgagcacag

SEQ ID NO: 1472 - DNA, 17 bp, Homo sapiens
ctgtgctcgtttttcca

SEQ ID NO: 1473 - DNA, 121 bp, Homo sapiens
gttttattttagcgaagaatagccagaattcagcaaatcgaaaaggacatacttcgtatacgacagcttttacagtcccaagcaacagaagcagaggttagtaaattgcctttcttgtttg

SEQ ID NO: 1474 - DNA, 121 bp, Homo sapiens
caaacaagaaaggcaatttactaacctctgcttctgttgcttgggactgtaaaagctgtcgtatacgaagtatgtccttttcgatttgctgaattctggctattcttcgctaaaataaaac

SEQ ID NO: 1475 - DNA, 17 bp, Homo sapiens
ttcgtatacgacagctt

SEQ ID NO: 1476 - DNA, 17 bp, Homo sapiens
aagctgtcgtatacgaa

SEQ ID NO: 1477 - DNA, 121 bp, Homo sapiens
ttattttagcgaagaatagccagaattcagcaaatcgaaaaggacatacttcgtatacgacagcttttacagtcccaagcaacagaagcagaggttagtaaattgcctttcttgtttgtgg

SEQ ID NO: 1478 - DNA, 121 bp, Homo sapiens
ccacaaacaagaaaggcaatttactaacctctgcttctgttgcttgggactgtaaaagctgtcgtatacgaagtatgtccttttcgatttgctgaattctggctattcttcgctaaaataa

SEQ ID NO: 1479 - DNA, 17 bp, Homo sapiens
gtatacgacagctttta

SEQ ID NO: 1480 - DNA, 17 bp, Homo sapiens
taaaagctgtcgtatac

SEQ ID NO: 1481 - DNA, 121 bp, Homo sapiens
agaaagcctacaccatttttgcatgtactgatgttaactccatcttaacagaggtcatctcagaacaagcatgaaaccggctcacatgatgctgagcggcagaatgaaggtcaaggagtgg

SEQ ID NO: 1482 - DNA, 121 bp, Homo sapiens
ccactccttgaccttcattctgccgctcagcatcatgtgagccggtttcatgcttgttctgagatgacctctgttaagatggagttaacatcagtacatgcaaaaatggtgtaggctttct

SEQ ID NO: 1483 - DNA, 17 bp, Homo sapiens
ggtcatctcagaacaag

SEQ ID NO: 1484 - DNA, 17 bp, Homo sapiens
cttgttctgagatgacc

SEQ ID NO: 1485 - DNA, 121 bp, Homo sapiens
cagaacaagcatgaaaccggctcacatgatgctgagcggcagaatgaaggtcaaggagtgggagaaatcaacatggcaacttctggtaatggtcaggtaaataaattattttatcatattt

SEQ ID NO: 1486 - DNA, 121 bp, Homo sapiens
aaatatgataaaataatttatttacctgaccattaccagaagttgccatgttgatttctcccactccttgaccttcattctgccgctcagcatcatgtgagccggtttcatgcttgttctg

SEQ ID NO: 1487 - DNA, 17 bp, Homo sapiens
aaggagtgggagaaatc

SEQ ID NO: 1488 - DNA, 17 bp, Homo sapiens
gatttctcccactcctt

SEQ ID NO: 1489 - DNA, 121 bp, Homo sapiens
cttcaaataacaaagcattatggtttatgttgattttatttttcagtgccagctcctgttgaacatcagatctgtcctgctgtgtgtgttctaatgaaactttcatttgatgaagagcata

SEQ ID NO: 1490 - DNA, 121 bp, Homo sapiens
tatgctcttcatcaaatgaaagtttcattagaacacacacagcaggacagatctgatgttcaacaggagctggcactgaaaaataaaatcaacataaaccataatgctttgttatttgaag

SEQ ID NO: 1491 - DNA, 17 bp, Homo sapiens
ctcctgttgaacatcag

SEQ ID NO: 1492 - DNA, 17 bp, Homo sapiens
ctgatgttcaacaggag

SEQ ID NO: 1493 - DNA, 121 bp, Homo sapiens
cagtgccagctcctgttgaacatcagatctgtcctgctgtgtgtgttctaatgaaactttcatttgatgaagagcatagacatgcaatgaatgaactaggtaagacaaaaatgttttttaa

SEQ ID NO: 1494 - DNA, 121 bp, Homo sapiens
ttaaaaaacatttttgtcttacctagttcattcattgcatgtctatgctcttcatcaaatgaaagtttcattagaacacacacagcaggacagatctgatgttcaacaggagctggcactg

SEQ ID NO: 1495 - DNA, 17 bp, Homo sapiens
gaaactttcatttgatg

SEQ ID NO: 1496 - DNA, 17 bp, Homo sapiens
catcaaatgaaagtttc

SEQ ID NO: 1497 - DNA, 121 bp, Homo sapiens
agttgttttattttagatgattgtctttttcctcttgccctttttaaattagggggactacaggccattgcagaattattgcaagtggactgtgaaatgtacgggcttactaatgaccact

SEQ ID NO: 1498 - DNA, 121 bp, Homo sapiens
agtggtcattagtaagcccgtacatttcacagtccacttgcaataattctgcaatggcctgtagtccccctaatttaaaaagggcaagaggaaaaagacaatcatctaaaataaaacaact

SEQ ID NO: 1499 - DNA, 17 bp, Homo sapiens
ggggactacaggccatt

SEQ ID NO: 1500 - DNA, 17 bp, Homo sapiens
aatggcctgtagtcccc

SEQ ID NO: 1501 - DNA, 121 bp, Homo sapiens
ttttaaattagggggactacaggccattgcagaattattgcaagtggactgtgaaatgtacgggcttactaatgaccactacagtattacactaagacgatatgctggaatggctttgaca

SEQ ID NO: 1502 - DNA, 121 bp, Homo sapiens
tgtcaaagccattccagcatatcgtcttagtgtaatactgtagtggtcattagtaagcccgtacatttcacagtccacttgcaataattctgcaatggcctgtagtccccctaatttaaaa

SEQ ID NO: 1503 - DNA, 17 bp, Homo sapiens
gaaatgtacgggcttac

SEQ ID NO: 1504 - DNA, 17 bp, Homo sapiens
gtaagcccgtacatttc

SEQ ID NO: 1505 - DNA, 121 bp, Homo sapiens
ttgcaagtggactgtgaaatgtatgggcttactaatgaccactacagtattacactaagacgatatgctggaatggctttgacaaacttgacttttggagatgtagccaacaaggtatgtt

SEQ ID NO: 1506 - DNA, 121 bp, Homo sapiens
aacataccttgttggctacatctccaaaagtcaagtttgtcaaagccattccagcatatcgtcttagtgtaatactgtagtggtcattagtaagcccatacatttcacagtccacttgcaa

SEQ ID NO: 1507 - DNA, 17 bp, Homo sapiens
cactaagacgatatgct

SEQ ID NO: 1508 - DNA, 17 bp, Homo sapiens
agcatatcgtcttagtg

SEQ ID NO: 1509 - DNA, 121 bp, Homo sapiens
agtggactgtgaaatgtatgggcttactaatgaccactacagtattacactaagacgatatgctggaatggctttgacaaacttgacttttggagatgtagccaacaaggtatgtttttat

SEQ ID NO: 1510 - DNA, 121 bp, Homo sapiens
ataaaaacataccttgttggctacatctccaaaagtcaagtttgtcaaagccattccagcatatcgtcttagtgtaatactgtagtggtcattagtaagcccatacatttcacagtccact

SEQ ID NO: 1511 - DNA, 17 bp, Homo sapiens
agacgatatgctggaat

SEQ ID NO: 1512 - DNA, 17 bp, Homo sapiens
attccagcatatcgtct

SEQ ID NO: 1513 - DNA, 121 bp, Homo sapiens
gacaaattccaactctaattagatgacccatattctgtttcttactaggaatcaaccctcaaaagcgtattgagtgccttatggaatttgtcagcacattgcactgagaataaagctgata

SEQ ID NO: 1514 - DNA, 121 bp, Homo sapiens
tatcagctttattctcagtgcaatgtgctgacaaattccataaggcactcaatacgcttttgagggttgattcctagtaagaaacagaatatgggtcatctaattagagttggaatttgtc

SEQ ID NO: 1515 - DNA, 17 bp, Homo sapiens
caaccctcaaaagcgta

SEQ ID NO: 1516 - DNA, 17 bp, Homo sapiens
tacgcttttgagggttg

SEQ ID NO: 1517 - DNA, 121 bp, Homo sapiens
tagatgacccatattctgtttcttactaggaatcaaccctcaaaagcgtattgagtgccttatggaatttgtcagcacattgcactgagaataaagctgatatatgtgctgtagatggtgc

SEQ ID NO: 1518 - DNA, 121 bp, Homo sapiens
gcaccatctacagcacatatatcagctttattctcagtgcaatgtgctgacaaattccataaggcactcaatacgcttttgagggttgattcctagtaagaaacagaatatgggtcatcta

SEQ ID NO: 1519 - DNA, 17 bp, Homo sapiens
gagtgccttatggaatt

SEQ ID NO: 1520 - DNA, 17 bp, Homo sapiens
aattccataaggcactc

SEQ ID NO: 1521 - DNA, 121 bp, Homo sapiens
atgacccatattctgtttcttactaggaatcaaccctcaaaagcgtattgagtgccttatggaatttgtcagcacattgcactgagaataaagctgatatatgtgctgtagatggtgcact

SEQ ID NO: 1522 - DNA, 121 bp, Homo sapiens
agtgcaccatctacagcacatatatcagctttattctcagtgcaatgtgctgacaaattccataaggcactcaatacgcttttgagggttgattcctagtaagaaacagaatatgggtcat

SEQ ID NO: 1523 - DNA, 17 bp, Homo sapiens
tgccttatggaatttgt

SEQ ID NO: 1524 - DNA, 17 bp, Homo sapiens
acaaattccataaggca

SEQ ID NO: 1525 - DNA, 121 bp, Homo sapiens
tgacccatattctgtttcttactaggaatcaaccctcaaaagcgtattgagtgccttatggaatttgtcagcacattgcactgagaataaagctgatatatgtgctgtagatggtgcactt

SEQ ID NO: 1526 - DNA, 121 bp, Homo sapiens
aagtgcaccatctacagcacatatatcagctttattctcagtgcaatgtgctgacaaattccataaggcactcaatacgcttttgagggttgattcctagtaagaaacagaatatgggtca

SEQ ID NO: 1527 - DNA, 17 bp, Homo sapiens
gccttatggaatttgtc

SEQ ID NO: 1528 - DNA, 17 bp, Homo sapiens
gacaaattccataaggc

SEQ ID NO: 1529 - DNA, 121 bp, Homo sapiens
taaagctgatatatgtgctgtagatggtgcacttgcatttttggttggcactcttacttaccggagccagacaaacactttagccattattgaaagtggaggtgggatattacggaatgtg

SEQ ID NO: 1530 - DNA, 121 bp, Homo sapiens
cacattccgtaatatcccacctccactttcaataatggctaaagtgtttgtctggctccggtaagtaagagtgccaaccaaaaatgcaagtgcaccatctacagcacatatatcagcttta

SEQ ID NO: 1531 - DNA, 17 bp, Homo sapiens
cttacttaccggagcca

SEQ ID NO: 1532 - DNA, 17 bp, Homo sapiens
tggctccggtaagtaag

SEQ ID NO: 1533 - DNA, 121 bp, Homo sapiens
gatatatgtgctgtagatggtgcacttgcatttttggttggcactcttacttaccggagccagacaaacactttagccattattgaaagtggaggtgggatattacggaatgtgtccagct

SEQ ID NO: 1534 - DNA, 121 bp, Homo sapiens
agctggacacattccgtaatatcccacctccactttcaataatggctaaagtgtttgtctggctccggtaagtaagagtgccaaccaaaaatgcaagtgcaccatctacagcacatatatc

SEQ ID NO: 1535 - DNA, 17 bp, Homo sapiens
accggagccagacaaac

SEQ ID NO: 1536 - DNA, 17 bp, Homo sapiens
gtttgtctggctccggt

SEQ ID NO: 1537 - DNA, 121 bp, Homo sapiens
tagatggtgcacttgcatttttggttggcactcttacttaccggagccagacaaacactttagccattattgaaagtggaggtgggatattacggaatgtgtccagcttgatagctacaaa

SEQ ID NO: 1538 - DNA, 121 bp, Homo sapiens
tttgtagctatcaagctggacacattccgtaatatcccacctccactttcaataatggctaaagtgtttgtctggctccggtaagtaagagtgccaaccaaaaatgcaagtgcaccatcta

SEQ ID NO: 1539 - DNA, 17 bp, Homo sapiens
aaacactttagccatta

SEQ ID NO: 1540 - DNA, 17 bp, Homo sapiens
taatggctaaagtgttt

SEQ ID NO: 1541 - DNA, 121 bp, Homo sapiens
gccattattgaaagtggaggtgggatattacggaatgtgtccagcttgatagctacaaatgaggaccacaggtatatatagagttttatattacttttaaagtacagaattcatactctca

SEQ ID NO: 1542 - DNA, 121 bp, Homo sapiens
tgagagtatgaattctgtactttaaaagtaatataaaactctatatatacctgtggtcctcatttgtagctatcaagctggacacattccgtaatatcccacctccactttcaataatggc

SEQ ID NO: 1543 - DNA, 17 bp, Homo sapiens
ctacaaatgaggaccac

SEQ ID NO: 1544 - DNA, 17 bp, Homo sapiens
gtggtcctcatttgtag

SEQ ID NO: 1545 - DNA, 121 bp, Homo sapiens
tgcatgtggaactttgtggaatctctcagcaagaaatcctaaagaccaggaagcattatgggacatgggggcagttagcatgctcaagaacctcattcattcaaagcacaaaatgattgct

SEQ ID NO: 1546 - DNA, 121 bp, Homo sapiens
agcaatcattttgtgctttgaatgaatgaggttcttgagcatgctaactgcccccatgtcccataatgcttcctggtctttaggatttcttgctgagagattccacaaagttccacatgca

SEQ ID NO: 1547 - DNA, 17 bp, Homo sapiens
gcattatgggacatggg

SEQ ID NO: 1548 - DNA, 17 bp, Homo sapiens
cccatgtcccataatgc

SEQ ID NO: 1549 - DNA, 121 bp, Homo sapiens
aagaccaggaagcattatgggacatgggggcagttagcatgctcaagaacctcattcattcaaagcacaaaatgattgctatgggaagtgctgcagctttaaggaatctcatggcaaatag

SEQ ID NO: 1550 - DNA, 121 bp, Homo sapiens
ctatttgccatgagattccttaaagctgcagcacttcccatagcaatcattttgtgctttgaatgaatgaggttcttgagcatgctaactgcccccatgtcccataatgcttcctggtctt

SEQ ID NO: 1551 - DNA, 17 bp, Homo sapiens
cattcattcaaagcaca

SEQ ID NO: 1552 - DNA, 17 bp, Homo sapiens
tgtgctttgaatgaatg

SEQ ID NO: 1553 - DNA, 121 bp, Homo sapiens
ggggcagttagcatgctcaagaacctcattcattcaaagcacaaaatgattgctatgggaagtgctgcagctttaaggaatctcatggcaaataggcctgcgaagtacaaggatgccaata

SEQ ID NO: 1554 - DNA, 121 bp, Homo sapiens
tattggcatccttgtacttcgcaggcctatttgccatgagattccttaaagctgcagcacttcccatagcaatcattttgtgctttgaatgaatgaggttcttgagcatgctaactgcccc

SEQ ID NO: 1555 - DNA, 17 bp, Homo sapiens
ctatgggaagtgctgca

SEQ ID NO: 1556 - DNA, 17 bp, Homo sapiens
tgcagcacttcccatag

SEQ ID NO: 1557 - DNA, 121 bp, Homo sapiens
tctcctggctcagcttgccatctcttcatgttaggaaacaaaaagccctagaagcagaattagatgctcagcacttatcagaaacttttgacaatatagacaatttaagtcccaaggcatc

SEQ ID NO: 1558 - DNA, 121 bp, Homo sapiens
gatgccttgggacttaaattgtctatattgtcaaaagtttctgataagtgctgagcatctaattctgcttctagggctttttgtttcctaacatgaagagatggcaagctgagccaggaga

SEQ ID NO: 1559 - DNA, 17 bp, Homo sapiens
agcagaattagatgctc

SEQ ID NO: 1560 - DNA, 17 bp, Homo sapiens
gagcatctaattctgct

SEQ ID NO: 1561 - DNA, 121 bp, Homo sapiens
ttagatgctcagcacttatcagaaacttttgacaatatagacaatttaagtcccaaggcatctcatcgtagtaagcagagacacagcaagtctctatggtgattatgtttttgacaccatc

SEQ ID NO: 1562 - DNA, 121 bp, Homo sapiens
gatggtgtcaaaaacataatcaccatagagacttgctgtgtctctgcttactacgatgagatgccttgggacttaaattgtctatattgtcaaaagtttctgataagtgctgagcatctaa

SEQ ID NO: 1563 - DNA, 17 bp, Homo sapiens
ccaaggcatctcatcgt

SEQ ID NO: 1564 - DNA, 17 bp, Homo sapiens
acgatgagatgccttgg

SEQ ID NO: 1565 - DNA, 121 bp, Homo sapiens
ctcatcgtagtaagcagagacacagcaagtctctatggtgattatgtttttgacaccaatcgacatgatgataataggtcagacattttaatactggcacatgactgtcctttcaccatat

SEQ ID NO: 1566 - DNA, 121 bp, Homo sapiens
atatggtgaaaggacagtcatgtgccagtattaaaatgtctgacctattatcatcatgtcgattggtgtcaaaaacataatcaccatagagacttgctgtgtctctgcttactacgatgag

SEQ ID NO: 1567 - DNA, 17 bp, Homo sapiens
acaccaatcgacatgat

SEQ ID NO: 1568 - DNA, 17 bp, Homo sapiens
atcatgtcgattggtgt

SEQ ID NO: 1569 - DNA, 121 bp, Homo sapiens
ggtctaggcaactaccatccagcaacagaaaatccaggaacttcttcaaagcgaggtttgcagatctccaccactgcagcccagattgccaaagtcatggaagaagtgtcagccattcata

SEQ ID NO: 1570 - DNA, 121 bp, Homo sapiens
tatgaatggctgacacttcttccatgactttggcaatctgggctgcagtggtggagatctgcaaacctcgctttgaagaagttcctggattttctgttgctggatggtagttgcctagacc

SEQ ID NO: 1571 - DNA, 17 bp, Homo sapiens
gaggtttgcagatctcc

SEQ ID NO: 1572 - DNA, 17 bp, Homo sapiens
ggagatctgcaaacctc

SEQ ID NO: 1573 - DNA, 121 bp, Homo sapiens
tacattgtgtgacagatgagagaaatgcacttagaagaagctctgctgcccatacacattcaaacacttacaatttcactaagtcggaaaattcaaataggacatgttctatgccttatgc

SEQ ID NO: 1574 - DNA, 121 bp, Homo sapiens
gcataaggcatagaacatgtcctatttgaattttccgacttagtgaaattgtaagtgtttgaatgtgtatgggcagcagagcttcttctaagtgcatttctctcatctgtcacacaatgta

SEQ ID NO: 1575 - DNA, 17 bp, Homo sapiens
tacacattcaaacactt

SEQ ID NO: 1576 - DNA, 17 bp, Homo sapiens
aagtgtttgaatgtgta

SEQ ID NO: 1577 - DNA, 121 bp, Homo sapiens; identical to SEQ ID NO: 1573

SEQ ID NO: 1578 - DNA, 121 bp, Homo sapiens; identical to SEQ ID NO: 1574

SEQ ID NO: 1579 - DNA, 17 bp, Homo sapiens
tacacattcaaacactt

SEQ ID NO: 1580 - DNA, 17 bp, Homo sapiens
aagtgtttgaatgtgta

SEQ ID NO: 1581 - DNA, 121 bp, Homo sapiens
gacagatgagagaaatgcacttagaagaagctctgctgcccatacacattcaaacacttacaatttcactaagtcggaaaattcaaataggacatgttctatgccttatgccaaattagaa

SEQ ID NO: 1582 - DNA, 121 bp, Homo sapiens
ttctaatttggcataaggcatagaacatgtcctatttgaattttccgacttagtgaaattgtaagtgtttgaatgtgtatgggcagcagagcttcttctaagtgcatttctctcatctgtc

SEQ ID NO: 1583 - DNA, 17 bp, Homo sapiens
aacacttacaatttcac

SEQ ID NO: 1584 - DNA, 17 bp, Homo sapiens
gtgaaattgtaagtgtt

SEQ ID NO: 1585 - DNA, 121 bp, Homo sapiens; identical to SEQ ID NO: 1581

SEQ ID NO: 1586 - DNA, 121 bp, Homo sapiens; identical to SEQ ID NO: 1582

SEQ ID NO: 1587 - DNA, 17 bp, Homo sapiens
aacacttacaatttcac

SEQ ID NO: 1588 - DNA, 17 bp, Homo sapiens
gtgaaattgtaagtgtt

SEQ ID NO: 1589 - DNA, 121 bp, Homo sapiens
accctcgattgaatcctattctgaagatgatgaaagtaagttttgcagttatggtcaatacccagccgacctagcccataaaatacatagtgcaaatcatatggatgataatgatggagaa

SEQ ID NO: 1590 - DNA, 121 bp, Homo sapiens
ttctccatcattatcatccatatgatttgcactatgtattttatgggctaggtcggctgggtattgaccataactgcaaaacttactttcatcatcttcagaataggattcaatcgagggt

SEQ ID NO: 1591 - DNA, 17 bp, Homo sapiens
ggtcaatacccagccga

SEQ ID NO: 1592 - DNA, 17 bp, Homo sapiens
tcggctgggtattgacc

SEQ ID NO: 1593 - DNA, 121 bp, Homo sapiens
tacccagccgacctagcccataaaatacatagtgcaaatcatatggatgataatgatggagaactagatacaccaataaattatagtcttaaatattcagatgagcagttgaactctggaa

SEQ ID NO: 1594 - DNA, 121 bp, Homo sapiens
ttccagagttcaactgctcatctgaatatttaagactataatttattggtgtatctagttctccatcattatcatccatatgatttgcactatgtattttatgggctaggtcggctgggta

SEQ ID NO: 1595 - DNA, 17 bp, Homo sapiens
atgatggagaactagat

SEQ ID NO: 1596 - DNA, 17 bp, Homo sapiens
atctagttctccatcat

SEQ ID NO: 1597 - DNA, 121 bp, Homo sapiens
atgaaaccctcgattgaatcctattctgaagatgatgaaagtaagttttgcagttatggtcaatacccagccgacctagcccataaaatacatagtgcaaatcatatggatgataatgatg

SEQ ID NO: 1598 - DNA, 121 bp, Homo sapiens
catcattatcatccatatgatttgcactatgtattttatgggctaggtcggctgggtattgaccataactgcaaaacttactttcatcatcttcagaataggattcaatcgagggtttcat

SEQ ID NO: 1599 - DNA, 17 bp, Homo sapiens
gttatggtcaataccca

SEQ ID NO: 1600 - DNA, 17 bp, Homo sapiens
tgggtattgaccataac

SEQ ID NO: 1601 - DNA, 121 bp, Homo sapiens
tgaagatgatgaaagtaagttttgcagttatggtcaatacccagccgacctagcccataaaatacatagtgcaaatcatatggatgataatgatggagaactagatacaccaataaattat

SEQ ID NO: 1602 - DNA, 121 bp, Homo sapiens
ataatttattggtgtatctagttctccatcattatcatccatatgatttgcactatgtattttatgggctaggtcggctgggtattgaccataactgcaaaacttactttcatcatcttca

SEQ ID NO: 1603 - DNA, 17 bp, Homo sapiens
gcccataaaatacatag

SEQ ID NO: 1604 - DNA, 17 bp, Homo sapiens
ctatgtattttatgggc

SEQ ID NO: 1605 - DNA, 121 bp, Homo sapiens
ataaattatagtcttaaatattcagatgagcagttgaactctggaaggcaaagtccttcacagaatgaaagatgggcaagacccaaacacataatagaagatgaaataaaacaaagtgagc

SEQ ID NO: 1606 - DNA, 121 bp, Homo sapiens
gctcactttgttttatttcatcttctattatgtgtttgggtcttgcccatctttcattctgtgaaggactttgccttccagagttcaactgctcatctgaatatttaagactataatttat

SEQ ID NO: 1607 - DNA, 17 bp, Homo sapiens
gtccttcacagaatgaa

SEQ ID NO: 1608 - DNA, 17 bp, Homo sapiens
ttcattctgtgaaggac

SEQ ID NO: 1609 - DNA, 121 bp, Homo sapiens
gaaagatgggcaagacccaaacacataatagaagatgaaataaaacaaagtgagcaaagacaatcaaggaatcaaagtacaacttatcctgtttatactgagagcactgatgataaacacc

SEQ ID NO: 1610 - DNA, 121 bp, Homo sapiens
ggtgtttatcatcagtgctctcagtataaacaggataagttgtactttgattccttgattgtctttgctcactttgttttatttcatcttctattatgtgtttgggtcttgcccatctttc

SEQ ID NO: 1611 - DNA, 17 bp, Homo sapiens
agcaaagacaatcaagg

SEQ ID NO: 1612 - DNA, 17 bp, Homo sapiens
ccttgattgtctttgct

SEQ ID NO: 1613 - DNA, 121 bp, Homo sapiens
aatagaagatgaaataaaacaaagtgagcaaagacaatcaaggaatcaaagtacaacttatcctgtttatactgagagcactgatgataaacacctcaagttccaaccacattttggacag

SEQ ID NO: 1614 - DNA, 121 bp, Homo sapiens
ctgtccaaaatgtggttggaacttgaggtgtttatcatcagtgctctcagtataaacaggataagttgtactttgattccttgattgtctttgctcactttgttttatttcatcttctatt

SEQ ID NO: 1615 - DNA, 17 bp, Homo sapiens
acaacttatcctgttta

SEQ ID NO: 1616 - DNA, 17 bp, Homo sapiens
taaacaggataagttgt

SEQ ID NO: 1617 - DNA, 121 bp, Homo sapiens
tgatgataaacacctcaagttccaaccacattttggacagcaggaatgtgtttctccatacaggtcacggggagccaatggttcagaaacaaatcgagtgggttctaatcatggaattaat

SEQ ID NO: 1618 - DNA, 121 bp, Homo sapiens
attaattccatgattagaacccactcgatttgtttctgaaccattggctccccgtgacctgtatggagaaacacattcctgctgtccaaaatgtggttggaacttgaggtgtttatcatca

SEQ ID NO: 1619 - DNA, 17 bp, Homo sapiens
tctccatacaggtcacg

SEQ ID NO: 1620 - DNA, 17 bp, Homo sapiens
cgtgacctgtatggaga

SEQ ID NO: 1621 - DNA, 121 bp, Homo sapiens
aaccacattttggacagcaggaatgtgtttctccatacaggtcacggggagccaatggttcagaaacaaatcgagtgggttctaatcatggaattaatcaaaatgtaagccagtctttgtg

SEQ ID NO: 1622 - DNA, 121 bp, Homo sapiens
cacaaagactggcttacattttgattaattccatgattagaacccactcgatttgtttctgaaccattggctccccgtgacctgtatggagaaacacattcctgctgtccaaaatgtggtt

SEQ ID NO: 1623 - DNA, 17 bp, Homo sapiens
caatggttcagaaacaa

SEQ ID NO: 1624 - DNA, 17 bp, Homo sapiens
ttgtttctgaaccattg

SEQ ID NO: 1625 - DNA, 121 bp, Homo sapiens
ggacagcaggaatgtgtttctccatacaggtcacggggagccaatggttcagaaacaaatcgagtgggttctaatcatggaattaatcaaaatgtaagccagtctttgtgtcaagaagatg

SEQ ID NO: 1626 - DNA, 121 bp, Homo sapiens
catcttcttgacacaaagactggcttacattttgattaattccatgattagaacccactcgatttgtttctgaaccattggctccccgtgacctgtatggagaaacacattcctgctgtcc

SEQ ID NO: 1627 - DNA, 17 bp, Homo sapiens
aaacaaatcgagtgggt

SEQ ID NO: 1628 - DNA, 17 bp, Homo sapiens
acccactcgatttgttt

SEQ ID NO: 1629 - DNA, 121 bp, Homo sapiens
gggttctaatcatggaattaatcaaaatgtaagccagtctttgtgtcaagaagatgactatgaagatgataagcctaccaattatagtgaacgttactctgaagaagaacagcatgaagaa

SEQ ID NO: 1630 - DNA, 121 bp, Homo sapiens
ttcttcatgctgttcttcttcagagtaacgttcactataattggtaggcttatcatcttcatagtcatcttcttgacacaaagactggcttacattttgattaattccatgattagaaccc

SEQ ID NO: 1631 - DNA, 17 bp, Homo sapiens
gatgactatgaagatga

SEQ ID NO: 1632 - DNA, 17 bp, Homo sapiens
tcatcttcatagtcatc

SEQ ID NO: 1633 - DNA, 121 bp, Homo sapiens
gaagatgactatgaagatgataagcctaccaattatagtgaacgttactctgaagaagaacagcatgaagaagaagagagaccaacaaattatagcataaaatataatgaagagaaacgtc

SEQ ID NO: 1634 - DNA, 121 bp, Homo sapiens
gacgtttctcttcattatattttatgctataatttgttggtctctcttcttcttcatgctgttcttcttcagagtaacgttcactataattggtaggcttatcatcttcatagtcatcttc

SEQ ID NO: 1635 - DNA, 17 bp, Homo sapiens
aagaagaacagcatgaa

SEQ ID NO: 1636 - DNA, 17 bp, Homo sapiens
ttcatgctgttcttctt

SEQ ID NO: 1637 - DNA, 121 bp, Homo sapiens
gaagaagagagaccaacaaattatagcataaaatataatgaagagaaacgtcatgtggatcagcctattgattatagtttaaaatatgccacagatattccttcatcacagaaacagtcat

SEQ ID NO: 1638 - DNA, 121 bp, Homo sapiens
atgactgtttctgtgatgaaggaatatctgtggcatattttaaactataatcaataggctgatccacatgacgtttctcttcattatattttatgctataatttgttggtctctcttcttc

SEQ ID NO: 1639 - DNA, 17 bp, Homo sapiens
atgtggatcagcctatt

SEQ ID NO: 1640 - DNA, 17 bp, Homo sapiens
aataggctgatccacat

SEQ ID NO: 1641 - DNA, 121 bp, Homo sapiens
aagagagaccaacaaattatagcataaaatataatgaagagaaacgtcatgtggatcagcctattgattatagtttaaaatatgccacagatattccttcatcacagaaacagtcattttc

SEQ ID NO: 1642 - DNA, 121 bp, Homo sapiens
gaaaatgactgtttctgtgatgaaggaatatctgtggcatattttaaactataatcaataggctgatccacatgacgtttctcttcattatattttatgctataatttgttggtctctctt

SEQ ID NO: 1643 - DNA, 17 bp, Homo sapiens
ggatcagcctattgatt

SEQ ID NO: 1644 - DNA, 17 bp, Homo sapiens
aatcaataggctgatcc

SEQ ID NO: 1645 - DNA, 121 bp, Homo sapiens
ataaaatataatgaagagaaacgtcatgtggatcagcctattgattatagtttaaaatatgccacagatattccttcatcacagaaacagtcattttcattctcaaagagttcatctggac

SEQ ID NO: 1646 - DNA, 121 bp, Homo sapiens
gtccagatgaactctttgagaatgaaaatgactgtttctgtgatgaaggaatatctgtggcatattttaaactataatcaataggctgatccacatgacgtttctcttcattatattttat

SEQ ID NO: 1647 - DNA, 17 bp, Homo sapiens
taaaatatgccacagat

SEQ ID NO: 1648 - DNA, 17 bp, Homo sapiens
atctgtggcatatttta

SEQ ID NO: 1649 - DNA, 121 bp, Homo sapiens
atcagcctattgattatagtttaaaatatgccacagatattccttcatcacagaaacagtcattttcattctcaaagagttcatctggacaaagcagtaaaaccgaacatatgtcttcaag

SEQ ID NO: 1650 - DNA, 121 bp, Homo sapiens
cttgaagacatatgttcggttttactgctttgtccagatgaactctttgagaatgaaaatgactgtttctgtgatgaaggaatatctgtggcatattttaaactataatcaataggctgat

SEQ ID NO: 1651 - DNA, 17 bp, Homo sapiens
gaaacagtcattttcat

SEQ ID NO: 1652 - DNA, 17 bp, Homo sapiens
atgaaaatgactgtttc

SEQ ID NO: 1653 - DNA, 121 bp, Homo sapiens
attatagtttaaaatatgccacagatattccttcatcacagaaacagtcattttcattctcaaagagttcatctggacaaagcagtaaaaccgaacatatgtcttcaagcagtgagaatac

SEQ ID NO: 1654 - DNA, 121 bp, Homo sapiens
gtattctcactgcttgaagacatatgttcggttttactgctttgtccagatgaactctttgagaatgaaaatgactgtttctgtgatgaaggaatatctgtggcatattttaaactataat

SEQ ID NO: 1655 - DNA, 17 bp, Homo sapiens
ttcattctcaaagagtt

SEQ ID NO: 1656 - DNA, 17 bp, Homo sapiens
aactctttgagaatgaa

SEQ ID NO: 1657 - DNA, 121 bp, Homo sapiens
accgaacatatgtcttcaagcagtgagaatacgtccacaccttcatctaatgccaagaggcagaatcagctccatccagttctgcacagagtagaagtggtcagcctcaaaggctgccact

SEQ ID NO: 1658 - DNA, 121 bp, Homo sapiens
agtggcagcctttgaggctgaccacttctactctgtgcagaactggatggagctgattctgcctcttggcattagatgaaggtgtggacgtattctcactgcttgaagacatatgttcggt

SEQ ID NO: 1659 - DNA, 17 bp, Homo sapiens
ccaagaggcagaatcag

SEQ ID NO: 1660 - DNA, 17 bp, Homo sapiens
ctgattctgcctcttgg

SEQ ID NO: 1661 - DNA, 121 bp, Homo sapiens
catatgtcttcaagcagtgagaatacgtccacaccttcatctaatgccaagaggcagaatcagctccatccagttctgcacagagtagaagtggtcagcctcaaaggctgccacttgcaag

SEQ ID NO: 1662 - DNA, 121 bp, Homo sapiens
cttgcaagtggcagcctttgaggctgaccacttctactctgtgcagaactggatggagctgattctgcctcttggcattagatgaaggtgtggacgtattctcactgcttgaagacatatg

SEQ ID NO: 1663 - DNA, 17 bp, Homo sapiens
ggcagaatcagctccat

SEQ ID NO: 1664 - DNA, 17 bp, Homo sapiens
atggagctgattctgcc

SEQ ID NO: 1665 - DNA, 121 bp, Homo sapiens
tcagctccatccaagttctgcacagagtagaagtggtcagcctcaaaaggctgccacttgcaaagtttcttctattaaccaagaaacaatacagacttattgtgtagaagatactccaata

SEQ ID NO: 1666 - DNA, 121 bp, Homo sapiens
tattggagtatcttctacacaataagtctgtattgtttcttggttaatagaagaaactttgcaagtggcagccttttgaggctgaccacttctactctgtgcagaacttggatggagctga

SEQ ID NO: 1667 - DNA, 17 bp, Homo sapiens
gccacttgcaaagtttc

SEQ ID NO: 1668 - DNA, 17 bp, Homo sapiens
gaaactttgcaagtggc

SEQ ID NO: 1669 - DNA, 121 bp, Homo sapiens
agtttcttctattaaccaagaaacaatacagacttattgtgtagaagatactccaatatgtttttcaagatgtagttcattatcatctttgtcatcagctgaagatgaaataggatgtaat

SEQ ID NO: 1670 - DNA, 121 bp, Homo sapiens
attacatcctatttcatcttcagctgatgacaaagatgataatgaactacatcttgaaaaacatattggagtatcttctacacaataagtctgtattgtttcttggttaatagaagaaact

SEQ ID NO: 1671 - DNA, 17 bp, Homo sapiens
ccaatatgtttttcaag

SEQ ID NO: 1672 - DNA, 17 bp, Homo sapiens
cttgaaaaacatattgg

SEQ ID NO: 1673 - DNA, 121 bp, Homo sapiens
aagaaacaatacagacttattgtgtagaagatactccaatatgtttttcaagatgtagttcattatcatctttgtcatcagctgaagatgaaataggatgtaatcagacgacacaggaagc

SEQ ID NO: 1674 - DNA, 121 bp, Homo sapiens
gcttcctgtgtcgtctgattacatcctatttcatcttcagctgatgacaaagatgataatgaactacatcttgaaaaacatattggagtatcttctacacaataagtctgtattgtttctt

SEQ ID NO: 1675 - DNA, 17 bp, Homo sapiens
atgtagttcattatcat

SEQ ID NO: 1676 - DNA, 17 bp, Homo sapiens
atgataatgaactacat

SEQ ID NO: 1677 - DNA, 121 bp, Homo sapiens
gatactccaatatgtttttcaagatgtagttcattatcatctttgtcatcagctgaagatgaaataggatgtaatcagacgacacaggaagcagattctgctaataccctgcaaatagcag

SEQ ID NO: 1678 - DNA, 121 bp, Homo sapiens
ctgctatttgcagggtattagcagaatctgcttcctgtgtcgtctgattacatcctatttcatcttcagctgatgacaaagatgataatgaactacatcttgaaaaacatattggagtatc

SEQ ID NO: 1679 - DNA, 17 bp, Homo sapiens
ctgaagatgaaatagga

SEQ ID NO: 1680 - DNA, 17 bp, Homo sapiens
tcctatttcatcttcag

SEQ ID NO: 1681 - DNA, 121 bp, Homo sapiens
tgtagttcattatcatctttgtcatcagctgaagatgaaataggatgtaatcagacgacacaggaagcagattctgctaataccctgcaaatagcagaaataaaagaaaagattggaacta

SEQ ID NO: 1682 - DNA, 121 bp, Homo sapiens
tagttccaatcttttcttttatttctgctatttgcagggtattagcagaatctgcttcctgtgtcgtctgattacatcctatttcatcttcagctgatgacaaagatgataatgaactaca

SEQ ID NO: 1683 - DNA, 17 bp, Homo sapiens
agacgacacaggaagca

SEQ ID NO: 1684 - DNA, 17 bp, Homo sapiens
tgcttcctgtgtcgtct

SEQ ID NO: 1685 - DNA, 121 bp, Homo sapiens
taggatgtaatcagacgacacaggaagcagattctgctaataccctgcaaatagcagaaataaaagaaaagattggaactaggtcagctgaagatcctgtgagcgaagttccagcagtgtc

SEQ ID NO: 1686 - DNA, 121 bp, Homo sapiens
gacactgctggaacttcgctcacaggatcttcagctgacctagttccaatcttttcttttatttctgctatttgcagggtattagcagaatctgcttcctgtgtcgtctgattacatccta

SEQ ID NO: 1687 - DNA, 17 bp, Homo sapiens
agcagaaataaaagaaa

SEQ ID NO: 1688 - DNA, 17 bp, Homo sapiens
tttcttttatttctgct

SEQ ID NO: 1689 - DNA, 121 bp, Homo sapiens
ccaagaaacaatacagacttattgtgtagaagatactccaatatgtttttcaagatgtagttcattatcatctttgtcatcagctgaagatgaaataggatgtaatcagacgacacaggaa

SEQ ID NO: 1690 - DNA, 121 bp, Homo sapiens
ttcctgtgtcgtctgattacatcctatttcatcttcagctgatgacaaagatgataatgaactacatcttgaaaaacatattggagtatcttctacacaataagtctgtattgtttcttgg

SEQ ID NO: 1691 - DNA, 17 bp, Homo sapiens
agatgtagttcattatc

SEQ ID NO: 1692 - DNA, 17 bp, Homo sapiens
gataatgaactacatct

SEQ ID NO: 1693 - DNA, 121 bp, Homo sapiens
gattctgctaataccctgcaaatagcagaaataaaagaaaagattggaactaggtcagctgaagatcctgtgagcgaagttccagcagtgtcacagcaccctagaaccaaatccagcagac

SEQ ID NO: 1694 - DNA, 121 bp, Homo sapiens
gtctgctggatttggttctagggtgctgtgacactgctggaacttcgctcacaggatcttcagctgacctagttccaatcttttcttttatttctgctatttgcagggtattagcagaatc

SEQ ID NO: 1695 - DNA, 17 bp, Homo sapiens
ggtcagctgaagatcct

SEQ ID NO: 1696 - DNA, 17 bp, Homo sapiens
aggatcttcagctgacc

SEQ ID NO: 1697 - DNA, 121 bp, Homo sapiens
aaagaaaagattggaactaggtcagctgaagatcctgtgagcgaagttccagcagtgtcacagcaccctagaaccaaatccagcagactgcagggttctagtttatcttcagaatcagcca

SEQ ID NO: 1698 - DNA, 121 bp, Homo sapiens
tggctgattctgaagataaactagaaccctgcagtctgctggatttggttctagggtgctgtgacactgctggaacttcgctcacaggatcttcagctgacctagttccaatcttttcttt

SEQ ID NO: 1699 - DNA, 17 bp, Homo sapiens
cagtgtcacagcaccct

SEQ ID NO: 1700 - DNA, 17 bp, Homo sapiens
agggtgctgtgacactg

SEQ ID NO: 1701 - DNA, 121 bp, Homo sapiens
gatcctgtgagcgaagttccagcagtgtcacagcaccctagaaccaaatccagcagactgcagggttctagtttatcttcagaatcagccaggcacaaagctgttgaattttcttcaggag

SEQ ID NO: 1702 - DNA, 121 bp, Homo sapiens
ctcctgaagaaaattcaacagctttgtgcctggctgattctgaagataaactagaaccctgcagtctgctggatttggttctagggtgctgtgacactgctggaacttcgctcacaggatc

SEQ ID NO: 1703 - DNA, 17 bp, Homo sapiens
gcagactgcagggttct

SEQ ID NO: 1704 - DNA, 17 bp, Homo sapiens
agaaccctgcagtctgc

SEQ ID NO: 1705 - DNA, 121 bp, Homo sapiens
aagttccagcagtgtcacagcaccctagaaccaaatccagcagactgcagggttctagtttatcttcagaatcagccaggcacaaagctgttgaattttcttcaggagcgaaatctccctc

SEQ ID NO: 1706 - DNA, 121 bp, Homo sapiens
gagggagatttcgctcctgaagaaaattcaacagctttgtgcctggctgattctgaagataaactagaaccctgcagtctgctggatttggttctagggtgctgtgacactgctggaactt

SEQ ID NO: 1707 - DNA, 17 bp, Homo sapiens
ttctagtttatcttcag

SEQ ID NO: 1708 - DNA, 17 bp, Homo sapiens
ctgaagataaactagaa

SEQ ID NO: 1709 - DNA, 121 bp, Homo sapiens
cagcaccctagaaccaaatccagcagactgcagggttctagtttatcttcagaatcagccaggcacaaagctgttgaattttcttcaggagcgaaatctccctcccgaaagtggtgctcag

SEQ ID NO: 1710 - DNA, 121 bp, Homo sapiens
ctgagcaccactttcgggagggagatttcgctcctgaagaaaattcaacagctttgtgcctggctgattctgaagataaactagaaccctgcagtctgctggatttggttctagggtgctg

SEQ ID NO: 1711 - DNA, 17 bp, Homo sapiens
aatcagccaggcacaaa

SEQ ID NO: 1712 - DNA, 17 bp, Homo sapiens
tttgtgcctggctgatt

SEQ ID NO: 1713 - DNA, 121 bp, Homo sapiens
ctgcagggttctagtttatcttcagaatcagccaggcacaaagctgttgaattttcttcaggagcgaaatctccctcccgaaagtggtgctcagacaccccaaagtccacctgaacactat

SEQ ID NO: 1714 - DNA, 121 bp, Homo sapiens
atagtgttcaggtggactttggggtgtctgagcaccactttcgggagggagatttcgctcctgaagaaaattcaacagctttgtgcctggctgattctgaagataaactagaaccctgcag

SEQ ID NO: 1715 - DNA, 17 bp, Homo sapiens
tttcttcaggagcgaaa

SEQ ID NO: 1716 - DNA, 17 bp, Homo sapiens
tttcgctcctgaagaaa

SEQ ID NO: 1717 - DNA, 121 bp, Homo sapiens
ccaggcacaaagctgttgaattttcttcaggagcgaaatctccctcccgaaagtggtgctcagacaccccaaagtccacctgaacactatgttcaggagaccccactcatgtttagcagat

SEQ ID NO: 1718 - DNA, 121 bp, Homo sapiens
atctgctaaacatgagtggggtctcctgaacatagtgttcaggtggactttggggtgtctgagcaccactttcgggagggagatttcgctcctgaagaaaattcaacagctttgtgcctgg

SEQ ID NO: 1719 - DNA, 17 bp, Homo sapiens
gtggtgctcagacaccc

SEQ ID NO: 1720 - DNA, 17 bp, Homo sapiens
gggtgtctgagcaccac

SEQ ID NO: 1721 - DNA, 121 bp, Homo sapiens
aaagctgttgaattttcttcaggagcgaaatctccctccaaaagtggtgctcagacacccaaaagtccacctgaacactatgttcaggagaccccactcatgtttagcagatgtacttctg

SEQ ID NO: 1722 - DNA, 121 bp, Homo sapiens
cagaagtacatctgctaaacatgagtggggtctcctgaacatagtgttcaggtggactttbgggtgtctgagcaccacttttggagggagatttcgctcctgaagaaaattcaacagcttt

SEQ ID NO: 1723 - DNA, 17 bp, Homo sapiens
agacacccbaaagtcca

SEQ ID NO: 1724 - DNA, 17 bp, Homo sapiens
tggacttttgggtgtct

SEQ ID NO: 1725 - DNA, 121 bp, Homo sapiens
cacctgaacactatgttcaggagaccccactcatgtttagcagatgtacttctgtcagttcacttgatagttttgagagtcgttcgattgccagctccgttcagagtgaaccatgcagtgg

SEQ ID NO: 1726 - DNA, 121 bp, Homo sapiens
ccactgcatggttcactctgaacggagctggcaatcgaacgactctcaaaactatcaagtgaactgacagaagtacatctgctaaacatgagtggggtctcctgaacatagtgttcaggtg

SEQ ID NO: 1727 - DNA, 17 bp, Homo sapiens
tgtcagttcacttgata

SEQ ID NO: 1728 - DNA, 17 bp, Homo sapiens
tatcaagtgaactgaca

SEQ ID NO: 1729 - DNA, 121 bp, Homo sapiens; identical to SEQ ID NO: 1725

SEQ ID NO: 1730 - DNA, 121 bp, Homo sapiens; identical to SEQ ID NO: 1726

SEQ ID NO: 1731 - DNA, 17 bp, Homo sapiens
tgtcagttcacttgata

SEQ ID NO: 1732 - DNA, 17 bp, Homo sapiens
tatcaagtgaactgaca

SEQ ID NO: 1733 - DNA, 121 bp, Homo sapiens
gttcaggagaccccactcatgtttagcagatgtacttctgtcagttcacttgatagttttgagagtcgttcgattgccagctccgttcagagtgaaccatgcagtggaatggtaggtggca

SEQ ID NO: 1734 - DNA, 121 bp, Homo sapiens
tgccacctaccattccactgcatggttcactctgaacggagctggcaatcgaacgactctcaaaactatcaagtgaactgacagaagtacatctgctaaacatgagtggggtctcctgaac

SEQ ID NO: 1735 - DNA, 17 bp, Homo sapiens
atagttttgagagtcgt

SEQ ID NO: 1736 - DNA, 17 bp, Homo sapiens
acgactctcaaaactat

SEQ ID NO: 1737 - DNA, 121 bp, Homo sapiens
caaaccatgccaccaagcagaagtaaaacacctccaccacctcctcaaacagctcaaaccaagcgagaagtacctaaaaataaagcacctactgctgaaaagagagagagtggacctaagc

SEQ ID NO: 1738 - DNA, 121 bp, Homo sapiens
gcttaggtccactctctctcttttcagcagtaggtgctttatttttaggtacttctcgcttggtttgagctgtttgaggaggtggtggaggtgttttacttctgcttggtggcatggtttg

SEQ ID NO: 1739 - DNA, 17 bp, Homo sapiens
ctcaaaccaagcgagaa

SEQ ID NO: 1740 - DNA, 17 bp, Homo sapiens
ttctcgcttggtttgag

SEQ ID NO: 1741 - DNA, 121 bp, Homo sapiens
accatgccaccaagcagaagtaaaacacctccaccacctcctcaaacagctcaaaccaagcgagaagtacctaaaaataaagcacctactgctgaaaagagagagagtggacctaagcaag

SEQ ID NO: 1742 - DNA, 121 bp, Homo sapiens
cttgcttaggtccactctctctcttttcagcagtaggtgctttatttttaggtacttctcgcttggtttgagctgtttgaggaggtggtggaggtgttttacttctgcttggtggcatggt

SEQ ID NO: 1743 - DNA, 17 bp, Homo sapiens
aaaccaagcgagaagta

SEQ ID NO: 1744 - DNA, 17 bp, Homo sapiens
tacttctcgcttggttt

SEQ ID NO: 1745 - DNA, 121 bp, Homo sapiens
cagatgctgatactttattacattttgccacggaaagtactccagatggattttcttgttcatccagcctgagtgctctgagcctcgatgagccatttatacagaaagatgtggaattaag

SEQ ID NO: 1746 - DNA, 121 bp, Homo sapiens
cttaattccacatctttctgtataaatggctcatcgaggctcagagcactcaggctggatgaacaagaaaatccatctggagtactttccgtggcaaaatgtaataaagtatcagcatctg

SEQ ID NO: 1747 - DNA, 17 bp, Homo sapiens
ttcttgttcatccagcc

SEQ ID NO: 1748 - DNA, 17 bp, Homo sapiens
ggctggatgaacaagaa

SEQ ID NO: 1749 - DNA, 121 bp, Homo sapiens
ctgagcctcgatgagccatttatacagaaagatgtggaattaagaataatgcctccagttcaggaaaatgacaatgggaatgaaacagaatcagagcagcctaaagaatcaaatgaaaacc

SEQ ID NO: 1750 - DNA, 121 bp, Homo sapiens
ggttttcatttgattctttaggctgctctgattctgtttcattcccattgtcattttcctgaactggaggcattattcttaattccacatctttctgtataaatggctcatcgaggctcag

SEQ ID NO: 1751 - DNA, 17 bp, Homo sapiens
ctccagttcaggaaaat

SEQ ID NO: 1752 - DNA, 17 bp, Homo sapiens
attttcctgaactggag

SEQ ID NO: 1753 - DNA, 121 bp, Homo sapiens
atgtggaattaagaataatgcctccagttcaggaaaatgacaatgggaatgaaacagaatcagagcagcctaaagaatcaaatgaaaaccaagagaaagaggcagaaaaaactattgattc

SEQ ID NO: 1754 - DNA, 121 bp, Homo sapiens
gaatcaatagttttttctgcctctttctcttggttttcatttgattctttaggctgctctgattctgtttcattcccattgtcattttcctgaactggaggcattattcttaattccacat

SEQ ID NO: 1755 - DNA, 17 bp, Homo sapiens
aacagaatcagagcagc

SEQ ID NO: 1756 - DNA, 17 bp, Homo sapiens
gctgctctgattctgtt

SEQ ID NO: 1757 - DNA, 121 bp, Homo sapiens
aaaaccaagagaaagaggcagaaaaaactattgattctgaaaaggacctattagatgattcagatgatgatgatattgaaatactagaagaatgtattatttctgccatgccaacaaagtc

SEQ ID NO: 1758 - DNA, 121 bp, Homo sapiens
gactttgttggcatggcagaaataatacattcttctagtatttcaatatcatcatcatctgaatcatctaataggtccttttcagaatcaatagttttttctgcctctttctcttggtttt

SEQ ID NO: 1759 - DNA, 17 bp, Homo sapiens
agatgattcagatgatg

SEQ ID NO: 1760 - DNA, 17 bp, Homo sapiens
catcatctgaatcatct

SEQ ID NO: 1761 - DNA, 121 bp, Homo sapiens
agagagttttctcagacaacaaagattcaaagaaacagaatttgaaaaataattccaaggacttcaatgataagctcccaaataatgaagatagagtcagaggaagttttgcttttgattc

SEQ ID NO: 1762 - DNA, 121 bp, Homo sapiens
gaatcaaaagcaaaacttcctctgactctatcttcattatttgggagcttatcattgaagtccttggaattatttttcaaattctgtttctttgaatctttgttgtctgagaaaactctct

SEQ ID NO: 1763 - DNA, 17 bp, Homo sapiens
ttccaaggacttcaatg

SEQ ID NO: 1764 - DNA, 17 bp, Homo sapiens
cattgaagtccttggaa

SEQ ID NO: 1765 - DNA, 121 bp, Homo sapiens
aaaactgacagcacagaatccagtggaacccaaagtcctaagcgccattctgggtcttaccttgtgacatctgtttaaaagagaggaagaatgaaactaagaaaattctatgttaattaca

SEQ ID NO: 1766 - DNA, 121 bp, Homo sapiens
tgtaattaacatagaattttcttagtttcattcttcctctcttttaaacagatgtcacaaggtaagacccagaatggcgcttaggactttgggttccactggattctgtgctgtcagtttt

SEQ ID NO: 1767 - DNA, 17 bp, Homo sapiens
ggtcttaccttgtgaca

SEQ ID NO: 1768 - DNA, 17 bp, Homo sapiens
tgtcacaaggtaagacc

SEQ ID NO: 1769 - DNA, 121 bp, Homo sapiens
atggagaataattctggccccgagctcattcccagcagatgccagctgatgtggtcatgggcacaaactgttatatctgagaaagagggagagacacaggccaaaataagcattcagtcaa

SEQ ID NO: 1770 - DNA, 17 bp, Homo sapiens
agtttgtgcccatgacc

SEQ ID NO: 1771 - DNA, 17 bp, Homo sapiens
ggtcatgggcacaaact

SEQ ID NO: 1772 - DNA, 121 bp, Homo sapiens
tgtcctaactcagctgggatgcaggcttacattgacattaaaaactgcccaaagaaaaccaggaatcttaagaaaataactcgtgagcagaggcggcacatgaagaggtgggaatacttca

SEQ ID NO: 1773 - DNA, 121 bp, Homo sapiens
tgaagtattcccacctcttcatgtgccgcctctgctcacgagttattttcttaagattcctggttttctttgggcagtttttaatgtcaatgtaagcctgcatcccagctgagttaggaca

SEQ ID NO: 1774 - DNA, 17 bp, Homo sapiens
agaaaaccaggaatctt

SEQ ID NO: 1775 - DNA, 17 bp, Homo sapiens
aagattcctggttttct

SEQ ID NO: 1776 - DNA, 121 bp, Homo sapiens
gtcctaactcagctgggatgcaggcttacattgacattaaaaactgcccaaagaaaaccaggaatcttaagaaaataactcgtgagcagaggcggcacatgaagaggtgggaatacttcat

SEQ ID NO: 1777 - DNA, 121 bp, Homo sapiens
atgaagtattcccacctcttcatgtgccgcctctgctcacgagttattttcttaagattcctggttttctttgggcagtttttaatgtcaatgtaagcctgcatcccagctgagttaggac

SEQ ID NO: 1778 - DNA, 17 bp, Homo sapiens
gaaaaccaggaatctta

SEQ ID NO: 1779 - DNA, 17 bp, Homo sapiens
taagattcctggttttc

SEQ ID NO: 1780 - DNA, 121 bp, Homo sapiens
ccacagaaaatgatgcccagtgcttaacaagaccatactacagtgacgtggacatcatgagagacatcgcctctgggctaataggactacttctaatctgtaagagcagatccctggacag

SEQ ID NO: 1781 - DNA, 121 bp, Homo sapiens
ctgtccagggatctgctcttacagattagaagtagtcctattagcccagaggcgatgtctctcatgatgtccacgtcactgtagtatggtcttgttaagcactgggcatcattttctgtgg

SEQ ID NO: 1782 - DNA, 17 bp, Homo sapiens
catcatgagagacatcg

SEQ ID NO: 1783 - DNA, 17 bp, Homo sapiens
cgatgtctctcatgatg

SEQ ID NO: 1784 - DNA, 121 bp, Homo sapiens
acatcgcctctgggctaataggactacttctaatctgtaagagcagatccctggacaggcgaggaatacaggtattttgtccttgaagtaacctttcagaaattctgagaatttcttctgg

SEQ ID NO: 1785 - DNA, 121 bp, Homo sapiens
ccagaagaaattctcagaatttctgaaaggttacttcaaggacaaaatacctgtattcctcgcctgtccagggatctgctcttacagattagaagtagtcctattagcccagaggcgatgt

SEQ ID NO: 1786 - DNA, 17 bp, Homo sapiens
ggacaggcgaggaatac

SEQ ID NO: 1787 - DNA, 17 bp, Homo sapiens
gtattcctcgcctgtcc

SEQ ID NO: 1788 - DNA, 121 bp, Homo sapiens
gacatcgcctctgggctaataggactacttctaatctgtaagagcagatccctggacaggcgaggaatacaggtattttgtccttgaagtaacctttcagaaattctgagaatttcttctg

SEQ ID NO: 1789 - DNA, 121 bp, Homo sapiens
cagaagaaattctcagaatttctgaaaggttacttcaaggacaaaatacctgtattcctcgcctgtccagggatctgctcttacagattagaagtagtcctattagcccagaggcgatgtc

SEQ ID NO: 1790 - DNA, 17 bp, Homo sapiens
tggacaggcgaggaata

SEQ ID NO: 1791 - DNA, 17 bp, Homo sapiens
tattcctcgcctgtcca

SEQ ID NO: 1792 - DNA, 121 bp, Homo sapiens
agtgatgctgactatgattaccagaacagactggctgcagcattaggaatcaggtcattccgaaactcatcattgaatcaggaagaagaagagttcaatcttactgccctagctctggaga

SEQ ID NO: 1793 - DNA, 121 bp, Homo sapiens
tctccagagctagggcagtaagattgaactcttcttcttcctgattcaatgatgagtttcggaatgacctgattcctaatgctgcagccagtctgttctggtaatcatagtcagcatcact

SEQ ID NO: 1794 - DNA, 17 bp, Homo sapiens
ggtcattccgaaactca

SEQ ID NO: 1795 - DNA, 17 bp, Homo sapiens
tgagtttcggaatgacc

SEQ ID NO: 1796 - DNA, 121 bp, Homo sapiens
tcagtcagacaaacctttccccagccctcggtcagatgcccatttctccagacctcagccatacaaccctttctctagacttcagccagacaaacctctctccagaactcagtcaaacaaa

SEQ ID NO: 1797 - DNA, 121 bp, Homo sapiens
tttgtttgactgagttctggagagaggtttgtctggctgaagtctagagaaagggttgtatggctgaggtctggagaaatgggcatctgaccgagggctggggaaaggtttgtctgactga

SEQ ID NO: 1798 - DNA, 17 bp, Homo sapiens
cctcagccatacaaccc

SEQ ID NO: 1799 - DNA, 17 bp, Homo sapiens
gggttgtatggctgagg

SEQ ID NO: 1800 - DNA, 121 bp, Homo sapiens
agctctccacctgcttctttctgtgccttttgcgattctgctttagtgccaccagaagatactacctgggtgcagtggaactgtcatgggactatatgcaaagtgatctcggtgagctgcc

SEQ ID NO: 1801 - DNA, 121 bp, Homo sapiens
ggcagctcaccgagatcactttgcatatagtcccatgacagttccactgcacccaggtagtatcttctggtggcactaaagcagaatcgcaaaaggcacagaaagaagcaggtggagagct

SEQ ID NO: 1802 - DNA, 17 bp, Homo sapiens
cagaagatactacctgg

SEQ ID NO: 1803 - DNA, 17 bp, Homo sapiens
ccaggtagtatcttctg

SEQ ID NO: 1804 - DNA, 121 bp, Homo sapiens
ccacctgcttctttctgtgccttttgcgattctgctttagtgccaccagaagatactacctgggtgcagtggaactgtcatgggactatatgcaaagtgatctcggtgagctgcctgtgga

SEQ ID NO: 1805 - DNA, 121 bp, Homo sapiens
tccacaggcagctcaccgagatcactttgcatatagtcccatgacagttccactgcacccaggtagtatcttctggtggcactaaagcagaatcgcaaaaggcacagaaagaagcaggtgg

SEQ ID NO: 1806 - DNA, 17 bp, Homo sapiens
atactacctgggtgcag

SEQ ID NO: 1807 - DNA, 17 bp, Homo sapiens
ctgcacccaggtagtat

SEQ ID NO: 1808 - DNA, 121 bp, Homo sapiens
  misc_feature (61)..(61): i
agtcatgcaaatagagctctccacctgcttctttctgtgccttttgcgattctgctttagngccaccagaagatactacctgggtgcagtggaactgtcatgggactatatgcaaagtgat

SEQ ID NO: 1809 - DNA, 121 bp, Homo sapiens
atcactttgcatatagtcccatgacagttccactgcacccaggtagtatcttctggtggcactaaagcagaatcgcaaaaggcacagaaagaagcaggtggagagctctatttgcatgact

SEQ ID NO: 1810 - DNA, 17 bp, Homo sapiens
tgctttagtgccaccag

SEQ ID NO: 1811 - DNA, 17 bp, Homo sapiens
ctggtggcactaaagca

SEQ ID NO: 1812 - DNA, 121 bp, Homo sapiens
catttgtagcaataagtcatgcaaatagagctctccacctgcttctttctgtgccttttgcgattctgctttagtgccaccagaagatactacctgggtgcagtggaactgtcatgggact

SEQ ID NO: 1813 - DNA, 121 bp, Homo sapiens
agtcccatgacagttccactgcacccaggtagtatcttctggtggcactaaagcagaatcgcaaaaggcacagaaagaagcaggtggagagctctatttgcatgacttattgctacaaatg

SEQ ID NO: 1814 - DNA, 17 bp, Homo sapiens
gccttttgcgattctgc

SEQ ID NO: 1815 - DNA, 17 bp, Homo sapiens
gcagaatcgcaaaaggc

SEQ ID NO: 1816 - DNA, 121 bp, Homo sapiens
ttctgtgccttttgcgattctgctttagtgccaccagaagatactacctgggtgcagtggaactgtcatgggactatatgcaaagtgatctcggtgagctgcctgtggacgcaaggtaaag

SEQ ID NO: 1817 - DNA, 121 bp, Homo sapiens
ctttaccttgcgtccacaggcagctcaccgagatcactttgcatatagtcccatgacagttccactgcacccaggtagtatcttctggtggcactaaagcagaatcgcaaaaggcacagaa

SEQ ID NO: 1818 - DNA, 17 bp, Homo sapiens
tgcagtggaactgtcat

SEQ ID NO: 1819 - DNA, 17 bp, Homo sapiens
atgacagttccactgca

SEQ ID NO: 1820 - DNA, 121 bp, Homo sapiens
cttttgcgattctgctttagtgccaccagaagatactacctgggtgcagtggaactgtcatgggactatatgcaaagtgatctcggtgagctgcctgtggacgcaaggtaaaggcatgtcc

SEQ ID NO: 1821 - DNA, 121 bp, Homo sapiens
ggacatgcctttaccttgcgtccacaggcagctcaccgagatcactttgcatatagtcccatgacagttccactgcacccaggtagtatcttctggtggcactaaagcagaatcgcaaaag

SEQ ID NO: 1822 - DNA, 17 bp, Homo sapiens
aactgtcatgggactat

SEQ ID NO: 1823 - DNA, 17 bp, Homo sapiens
atagtcccatgacagtt

SEQ ID NO: 1824 - DNA, 121 bp, Homo sapiens
ttcacgcagatttcctcctagagtgccaaaatcttttccattcaacacctcagtcgtgtacaaaaagactctgtttgtagaattcacggatcaccttttcaacatcgctaagccaaggcca

SEQ ID NO: 1825 - DNA, 121 bp, Homo sapiens
tggccttggcttagcgatgttgaaaaggtgatccgtgaattctacaaacagagtctttttgtacacgactgaggtgttgaatggaaaagattttggcactctaggaggaaatctgcgtgaa

SEQ ID NO: 1826 - DNA, 17 bp, Homo sapiens
gtcgtgtacaaaaagac

SEQ ID NO: 1827 - DNA, 17 bp, Homo sapiens
gtctttttgtacacgac

SEQ ID NO: 1828 - DNA, 121 bp, Homo sapiens
atcttttccattcaacacctcagtcgtgtacaaaaagactctgtttgtagaattcacggatcaccttttcaacatcgctaagccaaggccaccctggatgggtaatgaaaacaatgttgaa

SEQ ID NO: 1829 - DNA, 121 bp, Homo sapiens
ttcaacattgttttcattacccatccagggtggccttggcttagcgatgttgaaaaggtgatccgtgaattctacaaacagagtctttttgtacacgactgaggtgttgaatggaaaagat

SEQ ID NO: 1830 - DNA, 17 bp, Homo sapiens
ttcacggatcacctttt

SEQ ID NO: 1831 - DNA, 17 bp, Homo sapiens
aaaaggtgatccgtgaa

SEQ ID NO: 1832 - DNA, 121 bp, Homo sapiens
ttctggagtactatccccaagtaacctttggcggacatctcattcttacaggtctgctaggtcctaccatccaggctgaggtttatgatacagtggtcattacacttaagaacatggcttc

SEQ ID NO: 1833 - DNA, 121 bp, Homo sapiens
gaagccatgttcttaagtgtaatgaccactgtatcataaacctcagcctggatggtaggacctagcagacctgtaagaatgagatgtccgccaaaggttacttggggatagtactccagaa

SEQ ID NO: 1834 - DNA, 17 bp, Homo sapiens
tctgctaggtcctacca

SEQ ID NO: 1835 - DNA, 17 bp, Homo sapiens
tggtaggacctagcaga

SEQ ID NO: 1836 - DNA, 121 bp, Homo sapiens
caagtaacctttggcggacatctcattcttacaggtctgctaggtcctaccatccaggctgaggtttatgatacagtggtcattacacttaagaacatggcttcccatcctgtcagtcttc

SEQ ID NO: 1837 - DNA, 121 bp, Homo sapiens
gaagactgacaggatgggaagccatgttcttaagtgtaatgaccactgtatcataaacctcagcctggatggtaggacctagcagacctgtaagaatgagatgtccgccaaaggttacttg

SEQ ID NO: 1838 - DNA, 17 bp, Homo sapiens
tccaggctgaggtttat

SEQ ID NO: 1839 - DNA, 17 bp, Homo sapiens
ataaacctcagcctgga

SEQ ID NO: 1840 - DNA, 121 bp, Homo sapiens
taacctttggcggacatctcattcttacaggtctgctaggtcctaccatccaggctgaggtttatgatacagtggtcattacacttaagaacatggcttcccatcctgtcagtcttcatgc

SEQ ID NO: 1841 - DNA, 121 bp, Homo sapiens
gcatgaagactgacaggatgggaagccatgttcttaagtgtaatgaccactgtatcataaacctcagcctggatggtaggacctagcagacctgtaagaatgagatgtccgccaaaggtta

SEQ ID NO: 1842 - DNA, 17 bp, Homo sapiens
ggctgaggtttatgata

SEQ ID NO: 1843 - DNA, 17 bp, Homo sapiens
tatcataaacctcagcc

SEQ ID NO: 1844 - DNA, 121 bp, Homo sapiens
ttggcggacatctcattcttacaggtctgctaggtcctaccatccaggctgaggtttatgatacagtggtcattacacttaagaacatggcttcccatcctgtcagtcttcatgctgttgg

SEQ ID NO: 1845 - DNA, 121 bp, Homo sapiens
ccaacagcatgaagactgacaggatgggaagccatgttcttaagtgtaatgaccactgtatcataaacctcagcctggatggtaggacctagcagacctgtaagaatgagatgtccgccaa

SEQ ID NO: 1846 - DNA, 17 bp, Homo sapiens
ggtttatgatacagtgg

SEQ ID NO: 1847 - DNA, 17 bp, Homo sapiens
ccactgtatcataaacc

SEQ ID NO: 1848 - DNA, 121 bp, Homo sapiens; identical to SEQ ID NO: 1844

SEQ ID NO: 1849 - DNA, 121 bp, Homo sapiens; identical to SEQ ID NO: 1845

SEQ ID NO: 1850 - DNA, 17 bp, Homo sapiens
ggtttatgatacagtgg

SEQ ID NO: 1851 - DNA, 17 bp, Homo sapiens
ccactgtatcataaacc

SEQ ID NO: 1852 - DNA, 121 bp, Homo sapiens
atctcattcttacaggtctgctaggtcctaccatccaggctgaggtttatgatacagtggtcattacacttaagaacatggcttcccatcctgtcagtcttcatgctgttggtgtatccta

SEQ ID NO: 1853 - DNA, 121 bp, Homo sapiens
taggatacaccaacagcatgaagactgacaggatgggaagccatgttcttaagtgtaatgaccactgtatcataaacctcagcctggatggtaggacctagcagacctgtaagaatgagat

SEQ ID NO: 1854 - DNA, 17 bp, Homo sapiens
tacagtggtcattacac

SEQ ID NO: 1855 - DNA, 17 bp, Homo sapiens
gtgtaatgaccactgta

SEQ ID NO: 1856 - DNA, 121 bp, Homo sapiens
caggtctgctaggtcctaccatccaggctgaggtttatgatacagtggtcattacacttaagaacatggcttcccatcctgtcagtcttcatgctgttggtgtatcctactggaaagcttc

SEQ ID NO: 1857 - DNA, 121 bp, Homo sapiens
gaagctttccagtaggatacaccaacagcatgaagactgacaggatgggaagccatgttcttaagtgtaatgaccactgtatcataaacctcagcctggatggtaggacctagcagacctg

SEQ ID NO: 1858 - DNA, 17 bp, Homo sapiens
tacacttaagaacatgg

SEQ ID NO: 1859 - DNA, 17 bp, Homo sapiens
ccatgttcttaagtgta

SEQ ID NO: 1860 - DNA, 121 bp, Homo sapiens
ctgctaggtcctaccatccaggctgaggtttatgatacagtggtcattacacttaagaacatggcttcccatcctgtcagtcttcatgctgttggtgtatcctactggaaagcttctgagg

SEQ ID NO: 1861 - DNA, 121 bp, Homo sapiens
cctcagaagctttccagtaggatacaccaacagcatgaagactgacaggatgggaagccatgttcttaagtgtaatgaccactgtatcataaacctcagcctggatggtaggacctagcag

SEQ ID NO: 1862 - DNA, 17 bp, Homo sapiens
ttaagaacatggcttcc

SEQ ID NO: 1863 - DNA, 17 bp, Homo sapiens
ggaagccatgttcttaa

SEQ ID NO: 1864 - DNA, 121 bp, Homo sapiens
ctaccatccaggctgaggtttatgatacagtggtcattacacttaagaacatggcttcccatcctgtcagtcttcatgctgttggtgtatcctactggaaagcttctgagggtgagtaaaa

SEQ ID NO: 1865 - DNA, 121 bp, Homo sapiens
ttttactcaccctcagaagctttccagtaggatacaccaacagcatgaagactgacaggatgggaagccatgttcttaagtgtaatgaccactgtatcataaacctcagcctggatggtag

SEQ ID NO: 1866 - DNA, 17 bp, Homo sapiens
ggcttcccatcctgtca

SEQ ID NO: 1867 - DNA, 17 bp, Homo sapiens
tgacaggatgggaagcc

SEQ ID NO: 1868 - DNA, 121 bp, Homo sapiens
cctaccatccaggctgaggtttatgatacagtggtcattacacttaagaacatggcttcccatcctgtcagtcttcatgctgttggtgtatcctactggaaagcttctgagggtgagtaaa

SEQ ID NO: 1869 - DNA, 121 bp, Homo sapiens
tttactcaccctcagaagctttccagtaggatacaccaacagcatgaagactgacaggatgggaagccatgttcttaagtgtaatgaccactgtatcataaacctcagcctggatggtagg

SEQ ID NO: 1870 - DNA, 17 bp, Homo sapiens
tggcttcccatcctgtc

SEQ ID NO: 1871 - DNA, 17 bp, Homo sapiens
gacaggatgggaagcca

SEQ ID NO: 1872 - DNA, 121 bp, Homo sapiens
ctgaggtttatgatacagtggtcattacacttaagaacatggcttcccatcctgtcagtcttcatgctgttggtgtatcctactggaaagcttctgagggtgagtaaaataccctcctatt

SEQ ID NO: 1873 - DNA, 121 bp, Homo sapiens
aataggagggtattttactcaccctcagaagctttccagtaggatacaccaacagcatgaagactgacaggatgggaagccatgttcttaagtgtaatgaccactgtatcataaacctcag

SEQ ID NO: 1874 - DNA, 17 bp, Homo sapiens
tgtcagtcttcatgctg

SEQ ID NO: 1875 - DNA, 17 bp, Homo sapiens
cagcatgaagactgaca

SEQ ID NO: 1876 - DNA, 121 bp, Homo sapiens
gatacagtggtcattacacttaagaacatggcttcccatcctgtcagtcttcatgctgttggtgtatcctactggaaagcttctgagggtgagtaaaataccctcctattgtcctgtcatt

SEQ ID NO: 1877 - DNA, 121 bp, Homo sapiens
aatgacaggacaataggagggtattttactcaccctcagaagctttccagtaggatacaccaacagcatgaagactgacaggatgggaagccatgttcttaagtgtaatgaccactgtatc

SEQ ID NO: 1878 - DNA, 17 bp, Homo sapiens
atgctgttggtgtatcc

SEQ ID NO: 1879 - DNA, 17 bp, Homo sapiens
ggatacaccaacagcat

SEQ ID NO: 1880 - DNA, 121 bp, Homo sapiens
ctttgagtgtacagtggatatagaaaggacaattttatttcttcctgctataggagctgaatatgatgatcagaccagtcaaagggagaaagaagatgataaagtcttccctggtggaagc

SEQ ID NO: 1881 - DNA, 121 bp, Homo sapiens
gcttccaccagggaagactttatcatcttctttctccctttgactggtctgatcatcatattcagctcctatagcaggaagaaataaaattgtcctttctatatccactgtacactcaaag

SEQ ID NO: 1882 - DNA, 17 bp, Homo sapiens
ggagctgaatatgatga

SEQ ID NO: 1883 - DNA, 17 bp, Homo sapiens
tcatcatattcagctcc

SEQ ID NO: 1884 - DNA, 121 bp, Homo sapiens
ttgagtgtacagtggatatagaaaggacaattttatttcttcctgctataggagctgaatatgatgatcagaccagtcaaagggagaaagaagatgataaagtcttccctggtggaagcca

SEQ ID NO: 1885 - DNA, 121 bp, Homo sapiens
tggcttccaccagggaagactttatcatcttctttctccctttgactggtctgatcatcatattcagctcctatagcaggaagaaataaaattgtcctttctatatccactgtacactcaa

SEQ ID NO: 1886 - DNA, 17 bp, Homo sapiens
agctgaatatgatgatc

SEQ ID NO: 1887 - DNA, 17 bp, Homo sapiens
gatcatcatattcagct

SEQ ID NO: 1888 - DNA, 121 bp, Homo sapiens
gtacagtggatatagaaaggacaattttatttcttcctgctataggagctgaatatgatgatcagaccagtcaaagggagaaagaagatgataaagtcttccctggtggaagccatacata

SEQ ID NO: 1889 - DNA, 121 bp, Homo sapiens
tatgtatggcttccaccagggaagactttatcatcttctttctccctttgactggtctgatcatcatattcagctcctatagcaggaagaaataaaattgtcctttctatatccactgtac

SEQ ID NO: 1890 - DNA, 17 bp, Homo sapiens
atatgatgatcagacca

SEQ ID NO: 1891 - DNA, 17 bp, Homo sapiens
tggtctgatcatcatat

SEQ ID NO: 1892 - DNA, 121 bp, Homo sapiens
acagtggatatagaaaggacaattttatttcttcctgctataggagctgaatatgatgatcagaccagtcaaagggagaaagaagatgataaagtcttccctggtggaagccatacatatg

SEQ ID NO: 1893 - DNA, 121 bp, Homo sapiens
catatgtatggcttccaccagggaagactttatcatcttctttctccctttgactggtctgatcatcatattcagctcctatagcaggaagaaataaaattgtcctttctatatccactgt

SEQ ID NO: 1894 - DNA, 17 bp, Homo sapiens
atgatgatcagaccagt

SEQ ID NO: 1895 - DNA, 17 bp, Homo sapiens
actggtctgatcatcat

SEQ ID NO: 1896 - DNA, 121 bp, Homo sapiens
tggatatagaaaggacaattttatttcttcctgctataggagctgaatatgatgatcagaccagtcaaagggagaaagaagatgataaagtcttccctggtggaagccatacatatgtctg

SEQ ID NO: 1897 - DNA, 121 bp, Homo sapiens
cagacatatgtatggcttccaccagggaagactttatcatcttctttctccctttgactggtctgatcatcatattcagctcctatagcaggaagaaataaaattgtcctttctatatcca

SEQ ID NO: 1898 - DNA, 17 bp, Homo sapiens
tgatcagaccagtcaaa

SEQ ID NO: 1899 - DNA, 17 bp, Homo sapiens
tttgactggtctgatca

SEQ ID NO: 1900 - DNA, 121 bp, Homo sapiens
aggacaattttatttcttcctgctataggagctgaatatgatgatcagaccagtcaaagggagaaagaagatgataaagtcttccctggtggaagccatacatatgtctggcaggtcctga

SEQ ID NO: 1901 - DNA, 121 bp, Homo sapiens
tcaggacctgccagacatatgtatggcttccaccagggaagactttatcatcttctttctccctttgactggtctgatcatcatattcagctcctatagcaggaagaaataaaattgtcct

SEQ ID NO: 1902 - DNA, 17 bp, Homo sapiens
gtcaaagggagaaagaa

SEQ ID NO: 1903 - DNA, 17 bp, Homo sapiens
ttctttctccctttgac

SEQ ID NO: 1904 - DNA, 120 bp, Homo sapiens
tttcttcctgctataggagctgaatatgatgatcagaccagtcaaagggagaaagaagatgataaagtcttccctggtggaagccatacatatgtctggcaggtcctgmagagaatggtc

SEQ ID NO: 1905 - DNA, 121 bp, Homo sapiens
gaccattctctttcaggacctgccagacatatgtatggcttccaccagggaagactttatcatcttctttctccctttgactggtctgatcatcatattcagctcctatagcaggaagaaa

SEQ ID NO: 1906 - DNA, 17 bp, Homo sapiens
aagaagatgataaagtc

SEQ ID NO: 1907 - DNA, 17 bp, Homo sapiens
gactttatcatcttctt

SEQ ID NO: 1908 - DNA, 121 bp, Homo sapiens
agtcaaagggagaaagaagatgataaagtcttccctggtggaagccatacatatgtctggcaggtcctgaaagagaatggtccaatggcctctgacccactgtgccttacctactcatatc

SEQ ID NO: 1909 - DNA, 121 bp, Homo sapiens
gatatgagtaggtaaggcacagtgggtcagaggccattggaccattctctttcaggacctgccagacatatgtatggcttccaccagggaagactttatcatcttctttctccctttgact

SEQ ID NO: 1910 - DNA, 17 bp, Homo sapiens
atgtctggcaggtcctg

SEQ ID NO: 1911 - DNA, 17 bp, Homo sapiens
caggacctgccagacat

SEQ ID NO: 1912 - DNA, 121 bp, Homo sapiens
aaagggagaaagaagatgataaagtcttccctggtggaagccatacatatgtctggcaggtcctgaaagagaatggtccaatggcctctgacccactgtgccttacctactcatatctttc

SEQ ID NO: 1913 - DNA, 121 bp, Homo sapiens
gaaagatatgagtaggtaaggcacagtgggtcagaggccattggaccattctctttcaggacctgccagacatatgtatggcttccaccagggaagactttatcatcttctttctcccttt

SEQ ID NO: 1914 - DNA, 17 bp, Homo sapiens
ctggcaggtcctgaaag

SEQ ID NO: 1915 - DNA, 17 bp, Homo sapiens
ctttcaggacctgccag

SEQ ID NO: 1916 - DNA, 121 bp, Homo sapiens
agatgataaagtcttccctggtggaagccatacatatgtctggcaggtcctgaaagagaatggtccaatggcctctgacccactgtgccttacctactcatatctttctcatgtggacctg

SEQ ID NO: 1917 - DNA, 121 bp, Homo sapiens
caggtccacatgagaaagatatgagtaggtaaggcacagtgggtcagaggccattggaccattctctttcaggacctgccagacatatgtatggcttccaccagggaagactttatcatct

SEQ ID NO: 1918 - DNA, 17 bp, Homo sapiens
aaagagaatggtccaat

SEQ ID NO: 1919 - DNA, 17 bp, Homo sapiens
attggaccattctcttt

SEQ ID NO: 1920 - DNA, 121 bp, Homo sapiens
atgataaagtcttccctggtggaagccatacatatgtctggcaggtcctgaaagagaatggtccaatggcctctgacccactgtgccttacctactcatatctttctcatgtggacctggt

SEQ ID NO: 1921 - DNA, 121 bp, Homo sapiens
accaggtccacatgagaaagatatgagtaggtaaggcacagtgggtcagaggccattggaccattctctttcaggacctgccagacatatgtatggcttccaccagggaagactttatcat

SEQ ID NO: 1922 - DNA, 17 bp, Homo sapiens
agagaatggtccaatgg

SEQ ID NO: 1923 - DNA, 17 bp, Homo sapiens
ccattggaccattctct

SEQ ID NO: 1924 - DNA, 121 bp, Homo sapiens; identical to SEQ ID NO: 1920

SEQ ID NO: 1925 - DNA, 121 bp, Homo sapiens; identical to SEQ ID NO: 1921

SEQ ID NO: 1926 - DNA, 17 bp, Homo sapiens
agagaatggtccaatgg

SEQ ID NO: 1927 - DNA, 17 bp, Homo sapiens
ccattggaccattctct

SEQ ID NO: 1928 - DNA, 121 bp, Homo sapiens
gataaagtcttccctggtggaagccatacatatgtctggcaggtcctgaaagagaatggtccaatggcctctgacccactgtgccttacctactcatatctttctcatgtggacctggtaa

SEQ ID NO: 1929 - DNA, 121 bp, Homo sapiens
ttaccaggtccacatgagaaagatatgagtaggtaaggcacagtgggtcagaggccattggaccattctctttcaggacctgccagacatatgtatggcttccaccagggaagactttatc

SEQ ID NO: 1930 - DNA, 17 bp, Homo sapiens
agaatggtccaatggcc

SEQ ID NO: 1931 - DNA, 17 bp, Homo sapiens
ggccattggaccattct

SEQ ID NO: 1932 - DNA, 121 bp, Homo sapiens
ccatacatatgtctggcaggtcctgaaagagaatggtccaatggcctctgacccactgtgccttacctactcatatctttctcatgtggacctggtaaaagacttgaattcaggcctcatt

SEQ ID NO: 1933 - DNA, 121 bp, Homo sapiens
aatgaggcctgaattcaagtcttttaccaggtccacatgagaaagatatgagtaggtaaggcacagtgggtcagaggccattggaccattctctttcaggacctgccagacatatgtatgg

SEQ ID NO: 1934 - DNA, 17 bp, Homo sapiens
ccactgtgccttaccta

SEQ ID NO: 1935 - DNA, 17 bp, Homo sapiens
taggtaaggcacagtgg

SEQ ID NO: 1936 - DNA, 121 bp, Homo sapiens
tgtctggcaggtcctgaaagagaatggtccaatggcctctgacccactgtgccttacctactcatatctttctcatgtggacctggtaaaagacttgaattcaggcctcattggagcccta

SEQ ID NO: 1937 - DNA, 121 bp, Homo sapiens
tagggctccaatgaggcctgaattcaagtcttttaccaggtccacatgagaaagatatgagtaggtaaggcacagtgggtcagaggccattggaccattctctttcaggacctgccagaca

SEQ ID NO: 1938 - DNA, 17 bp, Homo sapiens
cttacctactcatatct

SEQ ID NO: 1939 - DNA, 17 bp, Homo sapiens
agatatgagtaggtaag

SEQ ID NO: 1940 - DNA, 121 bp, Homo sapiens
gtctggcaggtcctgaaagagaatggtccaatggcctctgacccactgtgccttacctactcatatctttctcatgtggacctggtaaaagacttgaattcaggcctcattggagccctac

SEQ ID NO: 1941 - DNA, 121 bp, Homo sapiens
gtagggctccaatgaggcctgaattcaagtcttttaccaggtccacatgagaaagatatgagtaggtaaggcacagtgggtcagaggccattggaccattctctttcaggacctgccagac

SEQ ID NO: 1942 - DNA, 17 bp, Homo sapiens
ttacctactcatatctt

SEQ ID NO: 1943 - DNA, 17 bp, Homo sapiens
aagatatgagtaggtaa

SEQ ID NO: 1944 - DNA, 121 bp, Homo sapiens
gtcctgaaagagaatggtccaatggcctctgacccactgtgccttacctactcatatctttctcatgtggacctggtaaaagacttgaattcaggcctcattggagccctactagtatgta

SEQ ID NO: 1945 - DNA, 121 bp, Homo sapiens
tacatactagtagggctccaatgaggcctgaattcaagtcttttaccaggtccacatgagaaagatatgagtaggtaaggcacagtgggtcagaggccattggaccattctctttcaggac

SEQ ID NO: 1946 - DNA, 17 bp, Homo sapiens
catatctttctcatgtg

SEQ ID NO: 1947 - DNA, 17 bp, Homo sapiens
cacatgagaaagatatg

SEQ ID NO: 1948 - DNA, 121 bp, Homo sapiens
aaagagaatggtccaatggcctctgacccactgtgccttacctactcatatctttctcatgtggacctggtaaaagacttgaattcaggcctcattggagccctactagtatgtagagaag

SEQ ID NO: 1949 - DNA, 121 bp, Homo sapiens
cttctctacatactagtagggctccaatgaggcctgaattcaagtcttttaccaggtccacatgagaaagatatgagtaggtaaggcacagtgggtcagaggccattggaccattctcttt

SEQ ID NO: 1950 - DNA, 17 bp, Homo sapiens
tttctcatgtggacctg

SEQ ID NO: 1951 - DNA, 17 bp, Homo sapiens
caggtccacatgagaaa

SEQ ID NO: 1952 - DNA, 121 bp, Homo sapiens
caatggcctctgacccactgtgccttacctactcatatctttctcatgtggacctggtaaaagacttgaattcaggcctcattggagccctactagtatgtagagaaggtaagtgtatgaa

SEQ ID NO: 1953 - DNA, 121 bp, Homo sapiens
ttcatacacttaccttctctacatactagtagggctccaatgaggcctgaattcaagtcttttaccaggtccacatgagaaagatatgagtaggtaaggcacagtgggtcagaggccattg

SEQ ID NO: 1954 - DNA, 17 bp, Homo sapiens
cctggtaaaagacttga

SEQ ID NO: 1955 - DNA, 17 bp, Homo sapiens
tcaagtcttttaccagg

SEQ ID NO: 1956 - DNA, 121 bp, Homo sapiens
acccactgtgccttacctactcatatctttctcatgtggacctggtaaaagacttgaattcaggcctcattggagccctactagtatgtagagaaggtaagtgtatgaaagcgtaggattg

SEQ ID NO: 1957 - DNA, 121 bp, Homo sapiens
caatcctacgctttcatacacttaccttctctacatactagtagggctccaatgaggcctgaattcaagtcttttaccaggtccacatgagaaagatatgagtaggtaaggcacagtgggt

SEQ ID NO: 1958 - DNA, 17 bp, Homo sapiens
cttgaattcaggcctca

SEQ ID NO: 1959 - DNA, 17 bp, Homo sapiens
tgaggcctgaattcaag

SEQ ID NO: 1960 - DNA, 121 bp, Homo sapiens
aatgttctcacttctttttcagggagtctggccaaggaaaagacacagaccttgcacaaatttatactactttttgctgtatttgatgaaggttagtgagtcttaatctgaattttggatt

SEQ ID NO: 1961 - DNA, 121 bp, Homo sapiens
aatccaaaattcagattaagactcactaaccttcatcaaatacagcaaaaagtagtataaatttgtgcaaggtctgtgtcttttccttggccagactccctgaaaaagaagtgagaacatt

SEQ ID NO: 1962 - DNA, 17 bp, Homo sapiens
tgcacaaatttatacta

SEQ ID NO: 1963 - DNA, 17 bp, Homo sapiens
tagtataaatttgtgca

SEQ ID NO: 1964 - DNA, 121 bp, Homo sapiens
cttctttttcagggagtctggccaaggaaaagacacagaccttgcacaaatttatactactttttgctgtatttgatgaaggttagtgagtcttaatctgaattttggattcctgaaagaa

SEQ ID NO: 1965 - DNA, 121 bp, Homo sapiens
ttctttcaggaatccaaaattcagattaagactcactaaccttcatcaaatacagcaaaaagtagtataaatttgtgcaaggtctgtgtcttttccttggccagactccctgaaaaagaag

SEQ ID NO: 1966 - DNA, 17 bp, Homo sapiens
tatactactttttgctg

SEQ ID NO: 1967 - DNA, 17 bp, Homo sapiens
cagcaaaaagtagtata

SEQ ID NO: 1968 - DNA, 121 bp, Homo sapiens
tttcagggagtctggccaaggaaaagacacagaccttgcacaaatttatactactttttgctgtatttgatgaaggttagtgagtcttaatctgaattttggattcctgaaagaaatcctc

SEQ ID NO: 1969 - DNA, 121 bp, Homo sapiens
gaggatttctttcaggaatccaaaattcagattaagactcactaaccttcatcaaatacagcaaaaagtagtataaatttgtgcaaggtctgtgtcttttccttggccagactccctgaaa

SEQ ID NO: 1970 - DNA, 17 bp, Homo sapiens
actttttgctgtatttg

SEQ ID NO: 1971 - DNA, 17 bp, Homo sapiens
caaatacagcaaaaagt

SEQ ID NO: 1972 - DNA, 121 bp, Homo sapiens
ttttcagggagtctggccaaggaaaagacacagaccttgcacaaatttatactactttttgctgtatttgatgaaggttagtgagtcttaatctgaattttggattcctgaaagaaatcct

SEQ ID NO: 1973 - DNA, 121 bp, Homo sapiens
aggatttctttcaggaatccaaaattcagattaagactcactaaccttcatcaaatacagcaaaaagtagtataaatttgtgcaaggtctgtgtcttttccttggccagactccctgaaaa

SEQ ID NO: 1974 - DNA, 17 bp, Homo sapiens
tactttttgctgtattt

SEQ ID NO: 1975 - DNA, 17 bp, Homo sapiens
aaatacagcaaaaagta

SEQ ID NO: 1976 - DNA, 121 bp, Homo sapiens
aactccttgatgcaggatagggatgctgcatctgctcgggcctggcctaaaatgcacacagtcaatggttatgtaaacaggtctctgccaggtatgtacacacctgctcaacaatcctcag

SEQ ID NO: 1977 - DNA, 121 bp, Homo sapiens
ctgaggattgttgagcaggtgtgtacatacctggcagagacctgtttacataaccattgactgtgtgcattttaggccaggcccgagcagatgcagcatccctatcctgcatcaaggagtt

SEQ ID NO: 1978 - DNA, 17 bp, Homo sapiens
tgcacacagtcaatggt

SEQ ID NO: 1979 - DNA, 17 bp, Homo sapiens
accattgactgtgtgca

SEQ ID NO: 1980 - DNA, 121 bp, Homo sapiens
atttcagattctctacttcatagccataggtgtcttattcctactttacaggtctgattggatgccacaggaaatcagtctattggcatgtgattggaatgggcaccactcctgaagtgca

SEQ ID NO: 1981 - DNA, 121 bp, Homo sapiens
tgcacttcaggagtggtgcccattccaatcacatgccaatagactgatttcctgtggcatccaatcagacctgtaaagtaggaataagacacctatggctatgaagtagagaatctgaaat

SEQ ID NO: 1982 - DNA, 17 bp, Homo sapiens
tctgattggatgccaca

SEQ ID NO: 1983 - DNA, 17 bp, Homo sapiens
tgtggcatccaatcaga

SEQ ID NO: 1984 - DNA, 121 bp, Homo sapiens
ataggtgtcttattcctactttacaggtctgattggatgccacaggaaatcagtctattggcatgtgattggaatgggcaccactcctgaagtgcactcaatattcctcgaaggtcacaca

SEQ ID NO: 1985 - DNA, 121 bp, Homo sapiens
tgtgtgaccttcgaggaatattgagtgcacttcaggagtggtgcccattccaatcacatgccaatagactgatttcctgtggcatccaatcagacctgtaaagtaggaataagacacctat

SEQ ID NO: 1986 - DNA, 17 bp, Homo sapiens
gtctattggcatgtgat

SEQ ID NO: 1987 - DNA, 17 bp, Homo sapiens
atcacatgccaatagac

SEQ ID NO: 1988 - DNA, 121 bp, Homo sapiens; identical to SEQ ID NO: 1984

SEQ ID NO: 1989 - DNA, 121 bp, Homo sapiens; identical to SEQ ID NO: 1985

SEQ ID NO: 1990 - DNA, 17 bp, Homo sapiens
gtctattggcatgtgat

SEQ ID NO: 1991 - DNA, 17 bp, Homo sapiens
atcacatgccaatagac

SEQ ID NO: 1992 - DNA, 121 bp, Homo sapiens
aggtgtcttattcctactttacaggtctgattggatgccacaggaaatcagtctattggcatgtgattggaatgggcaccactcctgaagtgcactcaatattcctcgaaggtcacacatt

SEQ ID NO: 1993 - DNA, 121 bp, Homo sapiens
aatgtgtgaccttcgaggaatattgagtgcacttcaggagtggtgcccattccaatcacatgccaatagactgatttcctgtggcatccaatcagacctgtaaagtaggaataagacacct

SEQ ID NO: 1994 - DNA, 17 bp, Homo sapiens
ctattggcatgtgattg

SEQ ID NO: 1995 - DNA, 17 bp, Homo sapiens
caatcacatgccaatag

SEQ ID NO: 1996 - DNA, 121 bp, Homo sapiens
tattcctactttacaggtctgattggatgccacaggaaatcagtctattggcatgtgattggaatgggcaccactcctgaagtgcactcaatattcctcgaaggtcacacatttcttgtga

SEQ ID NO: 1997 - DNA, 121 bp, Homo sapiens
tcacaagaaatgtgtgaccttcgaggaatattgagtgcacttcaggagtggtgcccattccaatcacatgccaatagactgatttcctgtggcatccaatcagacctgtaaagtaggaata

SEQ ID NO: 1998 - DNA, 17 bp, Homo sapiens
atgtgattggaatgggc

SEQ ID NO: 1999 - DNA, 17 bp, Homo sapiens
gcccattccaatcacat

SEQ ID NO: 2000 - DNA, 121 bp, Homo sapiens
ttggatgccacaggaaatcagtctattggcatgtgattggaatgggcaccactcctgaagtgcactcaatattcctcgaaggtcacacatttcttgtgaggaaccatcgccaggcgtcctt

SEQ ID NO: 2001 - DNA, 121 bp, Homo sapiens
aaggacgcctggcgatggttcctcacaagaaatgtgtgaccttcgaggaatattgagtgcacttcaggagtggtgcccattccaatcacatgccaatagactgatttcctgtggcatccaa

SEQ ID NO: 2002 - DNA, 17 bp, Homo sapiens
tcctgaagtgcactcaa

SEQ ID NO: 2003 - DNA, 17 bp, Homo sapiens
ttgagtgcacttcagga

SEQ ID NO: 2004 - DNA, 121 bp, Homo sapiens
cagtctattggcatgtgattggaatgggcaccactcctgaagtgcactcaatattcctcgaaggtcacacatttcttgtgaggaaccatcgccaggcgtccttggaaatctcgccaataac

SEQ ID NO: 2005 - DNA, 121 bp, Homo sapiens
gttattggcgagatttccaaggacgcctggcgatggttcctcacaagaaatgtgtgaccttcgaggaatattgagtgcacttcaggagtggtgcccattccaatcacatgccaatagactg

SEQ ID NO: 2006 - DNA, 17 bp, Homo sapiens
attcctcgaaggtcaca

SEQ ID NO: 2007 - DNA, 17 bp, Homo sapiens
tgtgaccttcgaggaat

SEQ ID NO: 2008 - DNA, 121 bp, Homo sapiens
tcagtctattggcatgtgattggaatgggcaccactcctgaagtgcactcaatattcctcgaaggtcacacatttcttgtgaggaaccatcgccaggcgtccttggaaatctcgccaataa

SEQ ID NO: 2009 - DNA, 121 bp, Homo sapiens
ttattggcgagatttccaaggacgcctggcgatggttcctcacaagaaatgtgtgaccttcgaggaatattgagtgcacttcaggagtggtgcccattccaatcacatgccaatagactga

SEQ ID NO: 2010 - DNA, 17 bp, Homo sapiens
tattcctcgaaggtcac

SEQ ID NO: 2011 - DNA, 17 bp, Homo sapiens
gtgaccttcgaggaata

SEQ ID NO: 2012 - DNA, 121 bp, Homo sapiens
ggcatgtgattggaatgggcaccactcctgaagtgcactcaatattcctcgaaggtcacacatttcttgtgaggaaccatcgccaggcgtccttggaaatctcgccaataactttccttac

SEQ ID NO: 2013 - DNA, 121 bp, Homo sapiens
gtaaggaaagttattggcgagatttccaaggacgcctggcgatggttcctcacaagaaatgtgtgaccttcgaggaatattgagtgcacttcaggagtggtgcccattccaatcacatgcc

SEQ ID NO: 2014 - DNA, 17 bp, Homo sapiens
aggtcacacatttcttg

SEQ ID NO: 2015 - DNA, 17 bp, Homo sapiens
caagaaatgtgtgacct

SEQ ID NO: 2016 - DNA, 121 bp, Homo sapiens
ttggaatgggcaccactcctgaagtgcactcaatattcctcgaaggtcacacatttcttgtgaggaaccatcgccaggcgtccttggaaatctcgccaataactttccttactgctcaaac

SEQ ID NO: 2017 - DNA, 121 bp, Homo sapiens
gtttgagcagtaaggaaagttattggcgagatttccaaggacgcctggcgatggttcctcacaagaaatgtgtgaccttcgaggaatattgagtgcacttcaggagtggtgcccattccaa

SEQ ID NO: 2018 - DNA, 17 bp, Homo sapiens
atttcttgtgaggaacc

SEQ ID NO: 2019 - DNA, 17 bp, Homo sapiens
ggttcctcacaagaaat

SEQ ID NO: 2020 - DNA, 121 bp, Homo sapiens
tgggcaccactcctgaagtgcactcaatattcctcgaaggtcacacatttcttgtgaggaaccatcgccaggcgtccttggaaatctcgccaataactttccttactgctcaaacactctt

SEQ ID NO: 2021 - DNA, 121 bp, Homo sapiens
aagagtgtttgagcagtaaggaaagttattggcgagatttccaaggacgcctggcgatggttcctcacaagaaatgtgtgaccttcgaggaatattgagtgcacttcaggagtggtgccca

SEQ ID NO: 2022 - DNA, 17 bp, Homo sapiens
tgtgaggaaccatcgcc

SEQ ID NO: 2023 - DNA, 17 bp, Homo sapiens
ggcgatggttcctcaca

SEQ ID NO: 2024 - DNA, 121 bp, Homo sapiens
accactcctgaagtgcactcaatattcctcgaaggtcacacatttcttgtgaggaaccatcgccaggcgtccttggaaatctcgccaataactttccttactgctcaaacactcttgatgg

SEQ ID NO: 2025 - DNA, 121 bp, Homo sapiens
ccatcaagagtgtttgagcagtaaggaaagttattggcgagatttccaaggacgcctggcgatggttcctcacaagaaatgtgtgaccttcgaggaatattgagtgcacttcaggagtggt

SEQ ID NO: 2026 - DNA, 17 bp, Homo sapiens
ggaaccatcgccaggcg

SEQ ID NO: 2027 - DNA, 17 bp, Homo sapiens
cgcctggcgatggttcc

SEQ ID NO: 2028 - DNA, 121 bp, Homo sapiens
ccactcctgaagtgcactcaatattcctcgaaggtcacacatttcttgtgaggaaccatcgccaggcgtccttggaaatctcgccaataactttccttactgctcaaacactcttgatgga

SEQ ID NO: 2029 - DNA, 121 bp, Homo sapiens
tccatcaagagtgtttgagcagtaaggaaagttattggcgagatttccaaggacgcctggcgatggttcctcacaagaaatgtgtgaccttcgaggaatattgagtgcacttcaggagtgg

SEQ ID NO: 2030 - DNA, 17 bp, Homo sapiens
gaaccatcgccaggcgt

SEQ ID NO: 2031 - DNA, 17 bp, Homo sapiens
acgcctggcgatggttc

SEQ ID NO: 2032 - DNA, 121 bp, Homo sapiens; identical to SEQ ID NO: 2028

SEQ ID NO: 2033 - DNA, 121 bp, Homo sapiens; identical to SEQ ID NO: 2029

SEQ ID NO: 2034 - DNA, 17 bp, Homo sapiens
gaaccatcgccaggcgt

SEQ ID NO: 2035 - DNA, 17 bp, Homo sapiens
acgcctggcgatggttc

SEQ ID NO: 2036 - DNA, 121 bp, Homo sapiens
ctgaagtgcactcaatattcctcgaaggtcacacatttcttgtgaggaaccatcgccaggcgtccttggaaatctcgccaataactttccttactgctcaaacactcttgatggaccttgg

SEQ ID NO: 2037 - DNA, 121 bp, Homo sapiens
ccaaggtccatcaagagtgtttgagcagtaaggaaagttattggcgagatttccaaggacgcctggcgatggttcctcacaagaaatgtgtgaccttcgaggaatattgagtgcacttcag

SEQ ID NO: 2038 - DNA, 17 bp, Homo sapiens
tcgccaggcgtccttgg

SEQ ID NO: 2039 - DNA, 17 bp, Homo sapiens
ccaaggacgcctggcga

SEQ ID NO: 2040 - DNA, 121 bp, Homo sapiens
cctgaagtgcactcaatattcctcgaaggtcacacatttcttgtgaggaaccatcgccaggcgtccttggaaatctcgccaataactttccttactgctcaaacactcttgatggaccttg

SEQ ID NO: 2041 - DNA, 121 bp, Homo sapiens
caaggtccatcaagagtgtttgagcagtaaggaaagttattggcgagatttccaaggacgcctggcgatggttcctcacaagaaatgtgtgaccttcgaggaatattgagtgcacttcagg

SEQ ID NO: 2042 - DNA, 17 bp, Homo sapiens
atcgccaggcgtccttg

SEQ ID NO: 2043 - DNA, 17 bp, Homo sapiens
caaggacgcctggcgat

SEQ ID NO: 2044 - DNA, 121 bp, Homo sapiens
tattcctcgaaggtcacacatttcttgtgaggaaccatcgccaggcgtccttggaaatctcgccaataactttccttactgctcaaacactcttgatggaccttggacagtttctactgtt

SEQ ID NO: 2045 - DNA, 121 bp, Homo sapiens
aacagtagaaactgtccaaggtccatcaagagtgtttgagcagtaaggaaagttattggcgagatttccaaggacgcctggcgatggttcctcacaagaaatgtgtgaccttcgaggaata

SEQ ID NO: 2046 - DNA, 17 bp, Homo sapiens
ggaaatctcgccaataa

SEQ ID NO: 2047 - DNA, 17 bp, Homo sapiens
ttattggcgagatttcc

SEQ ID NO: 2048 - DNA, 121 bp, Homo sapiens
gtcacacatttcttgtgaggaaccatcgccaggcgtccttggaaatctcgccaataactttccttactgctcaaacactcttgatggaccttggacagtttctactgttttgtcatatctc

SEQ ID NO: 2049 - DNA, 121 bp, Homo sapiens
gagatatgacaaaacagtagaaactgtccaaggtccatcaagagtgtttgagcagtaaggaaagttattggcgagatttccaaggacgcctggcgatggttcctcacaagaaatgtgtgac

SEQ ID NO: 2050 - DNA, 17 bp, Homo sapiens
aataactttccttactg

SEQ ID NO: 2051 - DNA, 17 bp, Homo sapiens
cagtaaggaaagttatt

SEQ ID NO: 2052 - DNA, 121 bp, Homo sapiens
acatttcttgtgaggaaccatcgccaggcgtccttggaaatctcgccaataactttccttactgctcaaacactcttgatggaccttggacagtttctactgttttgtcatatctcttccc

SEQ ID NO: 2053 - DNA, 121 bp, Homo sapiens
gggaagagatatgacaaaacagtagaaactgtccaaggtccatcaagagtgtttgagcagtaaggaaagttattggcgagatttccaaggacgcctggcgatggttcctcacaagaaatgt

SEQ ID NO: 2054 - DNA, 17 bp, Homo sapiens
ctttccttactgctcaa

SEQ ID NO: 2055 - DNA, 17 bp, Homo sapiens
ttgagcagtaaggaaag

SEQ ID NO: 2056 - DNA, 121 bp, Homo sapiens
catttcttgtgaggaaccatcgccaggcgtccttggaaatctcgccaataactttccttactgctcaaacactcttgatggaccttggacagtttctactgttttgtcatatctcttccca

SEQ ID NO: 2057 - DNA, 121 bp, Homo sapiens
tgggaagagatatgacaaaacagtagaaactgtccaaggtccatcaagagtgtttgagcagtaaggaaagttattggcgagatttccaaggacgcctggcgatggttcctcacaagaaatg

SEQ ID NO: 2058 - DNA, 17 bp, Homo sapiens
tttccttactgctcaaa

SEQ ID NO: 2059 - DNA, 17 bp, Homo sapiens
tttgagcagtaaggaaa

SEQ ID NO: 2060 - DNA, 121 bp, Homo sapiens
ttcttgtgaggaaccatcgccaggcgtccttggaaatctcgccaataactttccttactgctcaaacactcttgatggaccttggacagtttctactgttttgtcatatctcttcccacca

SEQ ID NO: 2061 - DNA, 121 bp, Homo sapiens
tggtgggaagagatatgacaaaacagtagaaactgtccaaggtccatcaagagtgtttgagcagtaaggaaagttattggcgagatttccaaggacgcctggcgatggttcctcacaagaa

SEQ ID NO: 2062 - DNA, 17 bp, Homo sapiens
ccttactgctcaaacac

SEQ ID NO: 2063 - DNA, 17 bp, Homo sapiens
gtgtttgagcagtaagg

SEQ ID NO: 2064 - DNA, 121 bp, Homo sapiens
tctcgccaataactttccttactgctcaaacactcttgatggaccttggacagtttctactgttttgtcatatctcttcccaccaacatggtaatatcttggatctttaaaatgaatatta

SEQ ID NO: 2065 - DNA, 121 bp, Homo sapiens
taatattcattttaaagatccaagatattaccatgttggtgggaagagatatgacaaaacagtagaaactgtccaaggtccatcaagagtgtttgagcagtaaggaaagttattggcgaga

SEQ ID NO: 2066 - DNA, 17 bp, Homo sapiens
gtttctactgttttgtc

SEQ ID NO: 2067 - DNA, 17 bp, Homo sapiens
gacaaaacagtagaaac

SEQ ID NO: 2068 - DNA, 121 bp, Homo sapiens
acagcctaatatagcaagacactctgacattgtttggtttgtctgactccagatggcatggaagcttatgtcaaagtagacagctgtccagaggaaccccaactacgaatgaaaaataatg

SEQ ID NO: 2069 - DNA, 121 bp, Homo sapiens
cattatttttcattcgtagttggggttcctctggacagctgtctactttgacataagcttccatgccatctggagtcagacaaaccaaacaatgtcagagtgtcttgctatattaggctgt

SEQ ID NO: 2070 - DNA, 17 bp, Homo sapiens
atggcatggaagcttat

SEQ ID NO: 2071 - DNA, 17 bp, Homo sapiens
ataagcttccatgccat

SEQ ID NO: 2072 - DNA, 121 bp, Homo sapiens
atatagcaagacactctgacattgtttggtttgtctgactccagatggcatggaagcttatgtcaaagtagacagctgtccagaggaaccccaactacgaatgaaaaataatgaagaagcg

SEQ ID NO: 2073 - DNA, 121 bp, Homo sapiens
cgcttcttcattatttttcattcgtagttggggttcctctggacagctgtctactttgacataagcttccatgccatctggagtcagacaaaccaaacaatgtcagagtgtcttgctatat

SEQ ID NO: 2074 - DNA, 17 bp, Homo sapiens
gaagcttatgtcaaagt

SEQ ID NO: 2075 - DNA, 17 bp, Homo sapiens
actttgacataagcttc

SEQ ID NO: 2076 - DNA, 121 bp, Homo sapiens
aagacactctgacattgtttggtttgtctgactccagatggcatggaagcttatgtcaaagtagacagctgtccagaggaaccccaactacgaatgaaaaataatgaagaagcggaagact

SEQ ID NO: 2077 - DNA, 121 bp, Homo sapiens
agtcttccgcttcttcattatttttcattcgtagttggggttcctctggacagctgtctactttgacataagcttccatgccatctggagtcagacaaaccaaacaatgtcagagtgtctt

SEQ ID NO: 2078 - DNA, 17 bp, Homo sapiens
atgtcaaagtagacagc

SEQ ID NO: 2079 - DNA, 17 bp, Homo sapiens
gctgtctactttgacat

SEQ ID NO: 2080 - DNA, 121 bp, Homo sapiens
tgacattgtttggtttgtctgactccagatggcatggaagcttatgtcaaagtagacagctgtccagaggaaccccaactacgaatgaaaaataatgaagaagcggaagactatgatgatg

SEQ ID NO: 2081 - DNA, 121 bp, Homo sapiens
catcatcatagtcttccgcttcttcattatttttcattcgtagttggggttcctctggacagctgtctactttgacataagcttccatgccatctggagtcagacaaaccaaacaatgtca

SEQ ID NO: 2082 - DNA, 17 bp, Homo sapiens
  misc_feature (9)..(9): i
tagacagcngtccagag

SEQ ID NO: 2083 - DNA, 17 bp, Homo sapiens
ctctggacagctgtcta

SEQ ID NO: 2084 - DNA, 121 bp, Homo sapiens
gacattgtttggtttgtctgactccagatggcatggaagcttatgtcaaagtagacagctgtccagaggaaccccaactacgaatgaaaaataatgaagaagcggaagactatgatgatga

SEQ ID NO: 2085 - DNA, 121 bp, Homo sapiens
tcatcatcatagtcttccgcttcttcattatttttcattcgtagttggggttcctctggacagctgtctactttgacataagcttccatgccatctggagtcagacaaaccaaacaatgtc

SEQ ID NO: 2086 - DNA, 17 bp, Homo sapiens
agacagctgtccagagg

SEQ ID NO: 2087 - DNA, 17 bp, Homo sapiens
cctctggacagctgtct

SEQ ID NO: 2088 - DNA, 121 bp, Homo sapiens
actccagatggcatggaagcttatgtcaaagtagacagctgtccagaggaaccccaactacgaatgaaaaataatgaagaagcggaagactatgatgatgatcttactgattctgaaatgg

SEQ ID NO: 2089 - DNA, 121 bp, Homo sapiens
ccatttcagaatcagtaagatcatcatcatagtcttccgcttcttcattatttttcattcgtagttggggttcctctggacagctgtctactttgacataagcttccatgccatctggagt

SEQ ID NO: 2090 - DNA, 17 bp, Homo sapiens
cccaactacgaatgaaa

SEQ ID NO: 2091 - DNA, 17 bp, Homo sapiens
tttcattcgtagttggg

SEQ ID NO: 2092 - DNA, 121 bp, Homo sapiens
gattctgaaatggatgtggtcaggtttgatgatgacaactctccttcctttatccaaattcgctcagttgccaagaagcatcctaaaacttgggtacattacattgctgctgaagaggagg

SEQ ID NO: 2093 - DNA, 121 bp, Homo sapiens
cctcctcttcagcagcaatgtaatgtacccaagttttaggatgcttcttggcaactgagcgaatttggataaaggaaggagagttgtcatcatcaaacctgaccacatccatttcagaatc

SEQ ID NO: 2094 - DNA, 17 bp, Homo sapiens
tccaaattcgctcagtt

SEQ ID NO: 2095 - DNA, 17 bp, Homo sapiens
aactgagcgaatttgga

SEQ ID NO: 2096 - DNA, 121 bp, Homo sapiens
attctgaaatggatgtggtcaggtttgatgatgacaactctccttcctttatccaaattcgctcagttgccaagaagcatcctaaaacttgggtacattacattgctgctgaagaggagga

SEQ ID NO: 2097 - DNA, 121 bp, Homo sapiens
tcctcctcttcagcagcaatgtaatgtacccaagttttaggatgcttcttggcaactgagcgaatttggataaaggaaggagagttgtcatcatcaaacctgaccacatccatttcagaat

SEQ ID NO: 2098 - DNA, 17 bp, Homo sapiens
ccaaattcgctcagttg

SEQ ID NO: 2099 - DNA, 17 bp, Homo sapiens
caactgagcgaatttgg

SEQ ID NO: 2100 - DNA, 121 bp, Homo sapiens
ctgaaatggatgtggtcaggtttgatgatgacaactctccttcctttatccaaattcgctcagttgccaagaagcatcctaaaacttgggtacattacattgctgctgaagaggaggactg

SEQ ID NO: 2101 - DNA, 121 bp, Homo sapiens
cagtcctcctcttcagcagcaatgtaatgtacccaagttttaggatgcttcttggcaactgagcgaatttggataaaggaaggagagttgtcatcatcaaacctgaccacatccatttcag

SEQ ID NO: 2102 - DNA, 17 bp, Homo sapiens
aattcgctcagttgcca

SEQ ID NO: 2103 - DNA, 17 bp, Homo sapiens
tggcaactgagcgaatt

SEQ ID NO: 2104 - DNA, 121 bp, Homo sapiens
tctgaaatggatgtggtcaggtttgatgatgacaactctccttcctttatccaaattcgctcagttgccaagaagcatcctaaaacttgggtacattacattgctgctgaagaggaggact

SEQ ID NO: 2105 - DNA, 121 bp, Homo sapiens
agtcctcctcttcagcagcaatgtaatgtacccaagttttaggatgcttcttggcaactgagcgaatttggataaaggaaggagagttgtcatcatcaaacctgaccacatccatttcaga

SEQ ID NO: 2106 - DNA, 17 bp, Homo sapiens
aaattcgctcagttgcc

SEQ ID NO: 2107 - DNA, 17 bp, Homo sapiens
ggcaactgagcgaattt

SEQ ID NO: 2108 - DNA, 121 bp, Homo sapiens; identical to SEQ ID NO: 2100

SEQ ID NO: 2109 - DNA, 121 bp, Homo sapiens; identical to SEQ ID NO: 2101

SEQ ID NO: 2110 - DNA, 17 bp, Homo sapiens
aattcgctcagttgcca

SEQ ID NO: 2111 - DNA, 17 bp, Homo sapiens
tggcaactgagcgaatt

SEQ ID NO: 2112 - DNA, 121 bp, Homo sapiens
ccttcctttatccaaattcgctcagttgccaagaagcatcctaaaacttgggtacattacattgctgctgaagaggaggactgggactatgctcccttagtcctcgcccccgatgacaggt

SEQ ID NO: 2113 - DNA, 121 bp, Homo sapiens
acctgtcatcgggggcgaggactaagggagcatagtcccagtcctcctcttcagcagcaatgtaatgtacccaagttttaggatgcttcttggcaactgagcgaatttggataaaggaagg

SEQ ID NO: 2114 - DNA, 17 bp, Homo sapiens
tacattacattgctgct

SEQ ID NO: 2115 - DNA, 17 bp, Homo sapiens
agcagcaatgtaatgta

SEQ ID NO: 2116 - DNA, 121 bp, Homo sapiens
cttcctttatccaaattcgctcagttgccaagaagcatcctaaaacttgggtacattacattgctgctgaagaggaggactgggactatgctcccttagtcctcgcccccgatgacaggta

SEQ ID NO: 2117 - DNA, 121 bp, Homo sapiens
tacctgtcatcgggggcgaggactaagggagcatagtcccagtcctcctcttcagcagcaatgtaatgtacccaagttttaggatgcttcttggcaactgagcgaatttggataaaggaag

SEQ ID NO: 2118 - DNA, 17 bp, Homo sapiens
acattacattgctgctg

SEQ ID NO: 2119 - DNA, 17 bp, Homo sapiens
cagcagcaatgtaatgt

SEQ ID NO: 2120 - DNA, 121 bp, Homo sapiens
aaattcgctcagttgccaagaagcatcctaaaacttgggtacattacattgctgctgaagaggaggactgggactatgctcccttagtcctcgcccccgatgacaggtaagcactttttga

SEQ ID NO: 2121 - DNA, 121 bp, Homo sapiens
tcaaaaagtgcttacctgtcatcgggggcgaggactaagggagcatagtcccagtcctcctcttcagcagcaatgtaatgtacccaagttttaggatgcttcttggcaactgagcgaattt

SEQ ID NO: 2122 - DNA, 17 bp, Homo sapiens
tgctgaagaggaggact

SEQ ID NO: 2123 - DNA, 17 bp, Homo sapiens
agtcctcctcttcagca

SEQ ID NO: 2124 - DNA, 121 bp, Homo sapiens
tcagttgccaagaagcatcctaaaacttgggtacattacattgctgctgaagaggaggactgggactatgctcccttagtcctcgcccccgatgacaggtaagcactttttgactattggt

SEQ ID NO: 2125 - DNA, 121 bp, Homo sapiens
accaatagtcaaaaagtgcttacctgtcatcgggggcgaggactaagggagcatagtcccagtcctcctcttcagcagcaatgtaatgtacccaagttttaggatgcttcttggcaactga

SEQ ID NO: 2126 - DNA, 17 bp, Homo sapiens
aggaggactgggactat

SEQ ID NO: 2127 - DNA, 17 bp, Homo sapiens
atagtcccagtcctcct

SEQ ID NO: 2128 - DNA, 121 bp, Homo sapiens
gcctacctagaatttttcttcccaacctctcatctttttttctcttatacagaagttataaaagtcaatatttgaacaatggccctcagcggattggtaggaagtacaaaaaagtccgatt

SEQ ID NO: 2129 - DNA, 121 bp, Homo sapiens
aatcggacttttttgtacttcctaccaatccgctgagggccattgttcaaatattgacttttataacttctgtataagagaaaaaaagatgagaggttgggaagaaaaattctaggtaggc

SEQ ID NO: 2130 - DNA, 17 bp, Homo sapiens
aagttataaaagtcaat

SEQ ID NO: 2131 - DNA, 17 bp, Homo sapiens
attgacttttataactt

SEQ ID NO: 2132 - DNA, 121 bp, Homo sapiens
ttttcttcccaacctctcatctttttttctcttatacagaagttataaaagtcaatatttgaacaatggccctcagcggattggtaggaagtacaaaaaagtccgatttatggcatacaca

SEQ ID NO: 2133 - DNA, 121 bp, Homo sapiens
tgtgtatgccataaatcggacttttttgtacttcctaccaatccgctgagggccattgttcaaatattgacttttataacttctgtataagagaaaaaaagatgagaggttgggaagaaaa

SEQ ID NO: 2134 - DNA, 17 bp, Homo sapiens
caatatttgaacaatgg

SEQ ID NO: 2135 - DNA, 17 bp, Homo sapiens
ccattgttcaaatattg

SEQ ID NO: 2136 - DNA, 121 bp, Homo sapiens
tcatctttttttctcttatacagaagttataaaagtcaatatttgaacaatggccctcagcggattggtaggaagtacaaaaaagtccgatttatggcatacacagatgaaacctttaaga

SEQ ID NO: 2137 - DNA, 121 bp, Homo sapiens
tcttaaaggtttcatctgtgtatgccataaatcggacttttttgtacttcctaccaatccgctgagggccattgttcaaatattgacttttataacttctgtataagagaaaaaaagatga

SEQ ID NO: 2138 - DNA, 17 bp, Homo sapiens
gccctcagcggattggt

SEQ ID NO: 2139 - DNA, 17 bp, Homo sapiens
accaatccgctgagggc

SEQ ID NO: 2140 - DNA, 121 bp, Homo sapiens
tttttctcttatacagaagttataaaagtcaatatttgaacaatggccctcagcggattggtaggaagtacaaaaaagtccgatttatggcatacacagatgaaacctttaagactcgtga

SEQ ID NO: 2141 - DNA, 121 bp, Homo sapiens
tcacgagtcttaaaggtttcatctgtgtatgccataaatcggacttttttgtacttcctaccaatccgctgagggccattgttcaaatattgacttttataacttctgtataagagaaaaa

SEQ ID NO: 2142 - DNA, 17 bp, Homo sapiens
gcggattggtaggaagt

SEQ ID NO: 2143 - DNA, 17 bp, Homo sapiens
acttcctaccaatccgc

SEQ ID NO: 2144 - DNA, 121 bp, Homo sapiens
gaagttataaaagtcaatatttgaacaatggccctcagcggattggtaggaagtacaaaaaagtccgatttatggcatacacagatgaaacctttaagactcgtgaagctattcagcatga

SEQ ID NO: 2145 - DNA, 121 bp, Homo sapiens
tcatgctgaatagcttcacgagtcttaaaggtttcatctgtgtatgccataaatcggacttttttgtacttcctaccaatccgctgagggccattgttcaaatattgacttttataacttc

SEQ ID NO: 2146 - DNA, 17 bp, Homo sapiens
gtacaaaaaagtccgat

SEQ ID NO: 2147 - DNA, 17 bp, Homo sapiens
atcggacttttttgtac

SEQ ID NO: 2148 - DNA, 121 bp, Homo sapiens
tataaaagtcaatatttgaacaatggccctcagcggattggtaggaagtacaaaaaagtccgatttatggcatacacagatgaaacctttaagactcgtgaagctattcagcatgaatcag

SEQ ID NO: 2149 - DNA, 121 bp, Homo sapiens
ctgattcatgctgaatagcttcacgagtcttaaaggtttcatctgtgtatgccataaatcggacttttttgtacttcctaccaatccgctgagggccattgttcaaatattgacttttata

SEQ ID NO: 2150 - DNA, 17 bp, Homo sapiens
aaaaagtccgatttatg

SEQ ID NO: 2151 - DNA, 17 bp, Homo sapiens
cataaatcggacttttt

SEQ ID NO: 2152 - DNA, 121 bp, Homo sapiens
tatttgaacaatggccctcagcggattggtaggaagtacaaaaaagtccgatttatggcatacacagatgaaacctttaagactcgtgaagctattcagcatgaatcaggaatcttgggac

SEQ ID NO: 2153 - DNA, 121 bp, Homo sapiens
gtcccaagattcctgattcatgctgaatagcttcacgagtcttaaaggtttcatctgtgtatgccataaatcggacttttttgtacttcctaccaatccgctgagggccattgttcaaata

SEQ ID NO: 2154 - DNA, 17 bp, Homo sapiens
ttatggcatacacagat

SEQ ID NO: 2155 - DNA, 17 bp, Homo sapiens
atctgtgtatgccataa

SEQ ID NO: 2156 - DNA, 121 bp, Homo sapiens
gccctcagcggattggtaggaagtacaaaaaagtccgatttatggcatacacagatgaaacctttaagactcgtgaagctattcagcatgaatcaggaatcttgggacctttactttatgg

SEQ ID NO: 2157 - DNA, 121 bp, Homo sapiens
ccataaagtaaaggtcccaagattcctgattcatgctgaatagcttcacgagtcttaaaggtttcatctgtgtatgccataaatcggacttttttgtacttcctaccaatccgctgagggc

SEQ ID NO: 2158 - DNA, 17 bp, Homo sapiens
agatgaaacctttaaga

SEQ ID NO: 2159 - DNA, 17 bp, Homo sapiens
tcttaaaggtttcatct

SEQ ID NO: 2160 - DNA, 121 bp, Homo sapiens
acacagatgaaacctttaagactcgtgaagctattcagcatgaatcaggaatcttgggacctttactttatggggaagttggagacacactgttggtaagttgaagaaaagatttaaggtc

SEQ ID NO: 2161 - DNA, 121 bp, Homo sapiens
gaccttaaatcttttcttcaacttaccaacagtgtgtctccaacttccccataaagtaaaggtcccaagattcctgattcatgctgaatagcttcacgagtcttaaaggtttcatctgtgt

SEQ ID NO: 2162 - DNA, 17 bp, Homo sapiens
cttgggacctttacttt

SEQ ID NO: 2163 - DNA, 17 bp, Homo sapiens
aaagtaaaggtcccaag

SEQ ID NO: 2164 - DNA, 121 bp, Homo sapiens
tacacagatgaaacctttaagactcgtgaagctattcagcatgaatcaggaatcttgggacctttactttatggggaagttggagacacactgttggtaagttgaagaaaagatttaaggt

SEQ ID NO: 2165 - DNA, 121 bp, Homo sapiens
accttaaatcttttcttcaacttaccaacagtgtgtctccaacttccccataaagtaaaggtcccaagattcctgattcatgctgaatagcttcacgagtcttaaaggtttcatctgtgta

SEQ ID NO: 2166 - DNA, 17 bp, Homo sapiens
tcttgggacctttactt

SEQ ID NO: 2167 - DNA, 17 bp, Homo sapiens
aagtaaaggtcccaaga

SEQ ID NO: 2168 - DNA, 121 bp, Homo sapiens
acctttaagactcgtgaagctattcagcatgaatcaggaatcttgggacctttactttatggggaagttggagacacactgttggtaagttgaagaaaagatttaaggtcaggtaagaaga

SEQ ID NO: 2169 - DNA, 121 bp, Homo sapiens
tcttcttacctgaccttaaatcttttcttcaacttaccaacagtgtgtctccaacttccccataaagtaaaggtcccaagattcctgattcatgctgaatagcttcacgagtcttaaaggt

SEQ ID NO: 2170 - DNA, 17 bp, Homo sapiens
tactttatggggaagtt

SEQ ID NO: 2171 - DNA, 17 bp, Homo sapiens
aacttccccataaagta

SEQ ID NO: 2172 - DNA, 121 bp, Homo sapiens
cctttaagactcgtgaagctattcagcatgaatcaggaatcttgggacctttactttatggggaagttggagacacactgttggtaagttgaagaaaagatttaaggtcaggtaagaagaa

SEQ ID NO: 2173 - DNA, 121 bp, Homo sapiens
ttcttcttacctgaccttaaatcttttcttcaacttaccaacagtgtgtctccaacttccccataaagtaaaggtcccaagattcctgattcatgctgaatagcttcacgagtcttaaagg

SEQ ID NO: 2174 - DNA, 17 bp, Homo sapiens
actttatggggaagttg

SEQ ID NO: 2175 - DNA, 17 bp, Homo sapiens
caacttccccataaagt

SEQ ID NO: 2176 - DNA, 121 bp, Homo sapiens
cgtgaagctattcagcatgaatcaggaatcttgggacctttactttatggggaagttggagacacactgttggtaagttgaagaaaagatttaaggtcaggtaagaagaaaaagtctggag

SEQ ID NO: 2177 - DNA, 121 bp, Homo sapiens
ctccagactttttcttcttacctgaccttaaatcttttcttcaacttaccaacagtgtgtctccaacttccccataaagtaaaggtcccaagattcctgattcatgctgaatagcttcacg

SEQ ID NO: 2178 - DNA, 17 bp, Homo sapiens
aagttggagacacactg

SEQ ID NO: 2179 - DNA, 17 bp, Homo sapiens
cagtgtgtctccaactt

SEQ ID NO: 2180 - DNA, 121 bp, Homo sapiens
tgttgatcctagtcgttttaggatttgatcttagatctcgcttatactttcagattatatttaagaatcaagcaagcagaccatataacatctaccctcacggaatcactgatgtccgtcc

SEQ ID NO: 2181 - DNA, 121 bp, Homo sapiens
ggacggacatcagtgattccgtgagggtagatgttatatggtctgcttgcttgattcttaaatataatctgaaagtataagcgagatctaagatcaaatcctaaaacgactaggatcaaca

SEQ ID NO: 2182 - DNA, 17 bp, Homo sapiens
gattatatttaagaatc

SEQ ID NO: 2183 - DNA, 17 bp, Homo sapiens
gattcttaaatataatc

SEQ ID NO: 2184 - DNA, 121 bp, Homo sapiens
tcgttttaggatttgatcttagatctcgcttatactttcagattatatttaagaatcaagcaagcagaccatataacatctaccctcacggaatcactgatgtccgtcctttgtattcaag

SEQ ID NO: 2185 - DNA, 121 bp, Homo sapiens
cttgaatacaaaggacggacatcagtgattccgtgagggtagatgttatatggtctgcttgcttgattcttaaatataatctgaaagtataagcgagatctaagatcaaatcctaaaacga

SEQ ID NO: 2186 - DNA, 17 bp, Homo sapiens
gaatcaagcaagcagac

SEQ ID NO: 2187 - DNA, 17 bp, Homo sapiens
gtctgcttgcttgattc

SEQ ID NO: 2188 - DNA, 121 bp, Homo sapiens
ttaggatttgatcttagatctcgcttatactttcagattatatttaagaatcaagcaagcagaccatataacatctaccctcacggaatcactgatgtccgtcctttgtattcaaggagat

SEQ ID NO: 2189 - DNA, 121 bp, Homo sapiens
atctccttgaatacaaaggacggacatcagtgattccgtgagggtagatgttatatggtctgcttgcttgattcttaaatataatctgaaagtataagcgagatctaagatcaaatcctaa

SEQ ID NO: 2190 - DNA, 17 bp, Homo sapiens
aagcaagcagaccatat

SEQ ID NO: 2191 - DNA, 17 bp, Homo sapiens
atatggtctgcttgctt

SEQ ID NO: 2192 - DNA, 121 bp, Homo sapiens
ttgatcttagatctcgcttatactttcagattatatttaagaatcaagcaagcagaccatataacatctaccctcacggaatcactgatgtccgtcctttgtattcaaggagattaccaaa

SEQ ID NO: 2193 - DNA, 121 bp, Homo sapiens
tttggtaatctccttgaatacaaaggacggacatcagtgattccgtgagggtagatgttatatggtctgcttgcttgattcttaaatataatctgaaagtataagcgagatctaagatcaa

SEQ ID NO: 2194 - DNA, 17 bp, Homo sapiens
cagaccatataacatct

SEQ ID NO: 2195 - DNA, 17 bp, Homo sapiens
agatgttatatggtctg

SEQ ID NO: 2196 - DNA, 121 bp, Homo sapiens
tttgatcttagatctcgcttatactttcagattatatttaagaatcaagcaagcagaccatataacatctaccctcacggaatcactgatgtccgtcctttgtattcaaggagattaccaa

SEQ ID NO: 2197 - DNA, 121 bp, Homo sapiens
ttggtaatctccttgaatacaaaggacggacatcagtgattccgtgagggtagatgttatatggtctgcttgcttgattcttaaatataatctgaaagtataagcgagatctaagatcaaa

SEQ ID NO: 2198 - DNA, 17 bp, Homo sapiens
gcagaccatataacatc

SEQ ID NO: 2199 - DNA, 17 bp, Homo sapiens
gatgttatatggtctgc

SEQ ID NO: 2200 - DNA, 121 bp, Homo sapiens
ttagatctcgcttatactttcagattatatttaagaatcaagcaagcagaccatataacatctaccctcacggaatcactgatgtccgtcctttgtattcaaggagattaccaaaaggtaa

SEQ ID NO: 2201 - DNA, 121 bp, Homo sapiens
ttaccttttggtaatctccttgaatacaaaggacggacatcagtgattccgtgagggtagatgttatatggtctgcttgcttgattcttaaatataatctgaaagtataagcgagatctaa

SEQ ID NO: 2202 - DNA, 17 bp, Homo sapiens
atataacatctaccctc

SEQ ID NO: 2203 - DNA, 17 bp, Homo sapiens
gagggtagatgttatat

SEQ ID NO: 2204 - DNA, 121 bp, Homo sapiens
ttatactttcagattatatttaagaatcaagcaagcagaccatataacatctaccctcacggaatcactgatgtccgtcctttgtattcaaggagattaccaaaaggtaaatattccctcg

SEQ ID NO: 2205 - DNA, 121 bp, Homo sapiens
cgagggaatatttaccttttggtaatctccttgaatacaaaggacggacatcagtgattccgtgagggtagatgttatatggtctgcttgcttgattcttaaatataatctgaaagtataa

SEQ ID NO: 2206 - DNA, 17 bp, Homo sapiens
accctcacggaatcact

SEQ ID NO: 2207 - DNA, 17 bp, Homo sapiens
agtgattccgtgagggt

SEQ ID NO: 2208 - DNA, 121 bp, Homo sapiens
ccaattctgccaggagaaatattcaaatataaatggacagtgactgtagaagatgggccaactaaatcagatcctcggtgcctgacccgctattactctagtttcgttaatatggagagag

SEQ ID NO: 2209 - DNA, 121 bp, Homo sapiens
ctctctccatattaacgaaactagagtaatagcgggtcaggcaccgaggatctgatttagttggcccatcttctacagtcactgtccatttatatttgaatatttctcctggcagaattgg

SEQ ID NO: 2210 - DNA, 17 bp, Homo sapiens
atgggccaactaaatca

SEQ ID NO: 2211 - DNA, 17 bp, Homo sapiens
tgatttagttggcccat

SEQ ID NO: 2212 - DNA, 121 bp, Homo sapiens
ccaggagaaatattcaaatataaatggacagtgactgtagaagatgggccaactaaatcagatcctcggtgcctgacccgctattactctagtttcgttaatatggagagagatctagctt

SEQ ID NO: 2213 - DNA, 121 bp, Homo sapiens
aagctagatctctctccatattaacgaaactagagtaatagcgggtcaggcaccgaggatctgatttagttggcccatcttctacagtcactgtccatttatatttgaatatttctcctgg

SEQ ID NO: 2214 - DNA, 17 bp, Homo sapiens
ctaaatcagatcctcgg

SEQ ID NO: 2215 - DNA, 17 bp, Homo sapiens
ccgaggatctgatttag

SEQ ID NO: 2216 - DNA, 121 bp, Homo sapiens
gaaatattcaaatataaatggacagtgactgtagaagatgggccaactaaatcagatcctcggtgcctgacccgctattactctagtttcgttaatatggagagagatctagcttcaggac

SEQ ID NO: 2217 - DNA, 121 bp, Homo sapiens
gtcctgaagctagatctctctccatattaacgaaactagagtaatagcgggtcaggcaccgaggatctgatttagttggcccatcttctacagtcactgtccatttatatttgaatatttc

SEQ ID NO: 2218 - DNA, 17 bp, Homo sapiens
cagatcctcggtgcctg

SEQ ID NO: 2219 - DNA, 17 bp, Homo sapiens
caggcaccgaggatctg

SEQ ID NO: 2220 - DNA, 121 bp, Homo sapiens
tataaatggacagtgactgtagaagatgggccaactaaatcagatcctcggtgcctgacccgctattactctagtttcgttaatatggagagagatctagcttcaggactcattggccctc

SEQ ID NO: 2221 - DNA, 121 bp, Homo sapiens
gagggccaatgagtcctgaagctagatctctctccatattaacgaaactagagtaatagcgggtcaggcaccgaggatctgatttagttggcccatcttctacagtcactgtccatttata

SEQ ID NO: 2222 - DNA, 17 bp, Homo sapiens
gcctgacccgctattac

SEQ ID NO: 2223 - DNA, 17 bp, Homo sapiens
gtaatagcgggtcaggc

SEQ ID NO: 2224 - DNA, 121 bp, Homo sapiens; identical to SEQ ID NO: 2220

SEQ ID NO: 2225 - DNA, 121 bp, Homo sapiens; identical to SEQ ID NO: 2221

SEQ ID NO: 2226 - DNA, 17 bp, Homo sapiens
gcctgacccgctattac

SEQ ID NO: 2227 - DNA, 17 bp, Homo sapiens
gtaatagcgggtcaggc

SEQ ID NO: 2228 - DNA, 121 bp, Homo sapiens
ataaatggacagtgactgtagaagatgggccaactaaatcagatcctcggtgcctgacccgctattactctagtttcgttaatatggagagagatctagcttcaggactcattggccctct

SEQ ID NO: 2229 - DNA, 121 bp, Homo sapiens
agagggccaatgagtcctgaagctagatctctctccatattaacgaaactagagtaatagcgggtcaggcaccgaggatctgatttagttggcccatcttctacagtcactgtccatttat

SEQ ID NO: 2230 - DNA, 17 bp, Homo sapiens
cctgacccgctattact

SEQ ID NO: 2231 - DNA, 17 bp, Homo sapiens
agtaatagcgggtcagg

SEQ ID NO: 2232 - DNA, 121 bp, Homo sapiens
acagtgactgtagaagatgggccaactaaatcagatcctcggtgcctgacccgctattactctagtttcgttaatatggagagagatctagcttcaggactcattggccctctcctcatct

SEQ ID NO: 2233 - DNA, 121 bp, Homo sapiens
agatgaggagagggccaatgagtcctgaagctagatctctctccatattaacgaaactagagtaatagcgggtcaggcaccgaggatctgatttagttggcccatcttctacagtcactgt

SEQ ID NO: 2234 - DNA, 17 bp, Homo sapiens
gctattactctagtttc

SEQ ID NO: 2235 - DNA, 17 bp, Homo sapiens
gaaactagagtaatagc

SEQ ID NO: 2236 - DNA, 121 bp, Homo sapiens
gtgactgtagaagatgggccaactaaatcagatcctcggtgcctgacccgctattactctagtttcgttaatatggagagagatctagcttcaggactcattggccctctcctcatctgct

SEQ ID NO: 2237 - DNA, 121 bp, Homo sapiens
agcagatgaggagagggccaatgagtcctgaagctagatctctctccatattaacgaaactagagtaatagcgggtcaggcaccgaggatctgatttagttggcccatcttctacagtcac

SEQ ID NO: 2238 - DNA, 17 bp, Homo sapiens
attactctagtttcgtt

SEQ ID NO: 2239 - DNA, 17 bp, Homo sapiens
aacgaaactagagtaat

SEQ ID NO: 2240 - DNA, 121 bp, Homo sapiens
tagaagatgggccaactaaatcagatcctcggtgcctgacccgctattactctagtttcgttaatatggagagagatctagcttcaggactcattggccctctcctcatctgctacaaaga

SEQ ID NO: 2241 - DNA, 121 bp, Homo sapiens
tctttgtagcagatgaggagagggccaatgagtcctgaagctagatctctctccatattaacgaaactagagtaatagcgggtcaggcaccgaggatctgatttagttggcccatcttcta

SEQ ID NO: 2242 - DNA, 17 bp, Homo sapiens
tagtttcgttaatatgg

SEQ ID NO: 2243 - DNA, 17 bp, Homo sapiens
ccatattaacgaaacta

SEQ ID NO: 2244 - DNA, 121 bp, Homo sapiens
caactaaatcagatcctcggtgcctgacccgctattactctagtttcgttaatatggagagagatctagcttcaggactcattggccctctcctcatctgctacaaagaatctgtagatca

SEQ ID NO: 2245 - DNA, 121 bp, Homo sapiens
tgatctacagattctttgtagcagatgaggagagggccaatgagtcctgaagctagatctctctccatattaacgaaactagagtaatagcgggtcaggcaccgaggatctgatttagttg

SEQ ID NO: 2246 - DNA, 17 bp, Homo sapiens
tatggagagagatctag

SEQ ID NO: 2247 - DNA, 17 bp, Homo sapiens
ctagatctctctccata

SEQ ID NO: 2248 - DNA, 121 bp, Homo sapiens
ctaaatcagatcctcggtgcctgacccgctattactctagtttcgttaatatggagagagatctagcttcaggactcattggccctctcctcatctgctacaaagaatctgtagatcaaag

SEQ ID NO: 2249 - DNA, 121 bp, Homo sapiens
ctttgatctacagattctttgtagcagatgaggagagggccaatgagtcctgaagctagatctctctccatattaacgaaactagagtaatagcgggtcaggcaccgaggatctgatttag

SEQ ID NO: 2250 - DNA, 17 bp, Homo sapiens
ggagagagatctagctt

SEQ ID NO: 2251 - DNA, 17 bp, Homo sapiens
aagctagatctctctcc

SEQ ID NO: 2252 - DNA, 121 bp, Homo sapiens
actaaatcagatcctcggtgcctgacccgctattactctagtttcgttaatatggagagagatctagcttcaggactcattggccctctcctcatctgctacaaagaatctgtagatcaaa

SEQ ID NO: 2253 - DNA, 121 bp, Homo sapiens
tttgatctacagattctttgtagcagatgaggagagggccaatgagtcctgaagctagatctctctccatattaacgaaactagagtaatagcgggtcaggcaccgaggatctgatttagt

SEQ ID NO: 2254 - DNA, 17 bp, Homo sapiens
tggagagagatctagct

SEQ ID NO: 2255 - DNA, 17 bp, Homo sapiens
agctagatctctctcca

SEQ ID NO: 2256 - DNA, 121 bp, Homo sapiens; identical to SEQ ID NO: 2252

SEQ ID NO: 2257 - DNA, 121 bp, Homo sapiens; identical to SEQ ID NO: 2253

SEQ ID NO: 2258 - DNA, 17 bp, Homo sapiens
tggagagagatctagct

SEQ ID NO: 2259 - DNA, 17 bp, Homo sapiens
agctagatctctctcca

SEQ ID NO: 2260 - DNA, 121 bp, Homo sapiens
gttaatatggagagagatctagcttcaggactcattggccctctcctcatctgctacaaagaatctgtagatcaaagaggaaaccaggtgagttcttgcctttccaagtgctgggtttcat

SEQ ID NO: 2261 - DNA, 121 bp, Homo sapiens
atgaaacccagcacttggaaaggcaagaactcacctggtttcctctttgatctacagattctttgtagcagatgaggagagggccaatgagtcctgaagctagatctctctccatattaac

SEQ ID NO: 2262 - DNA, 17 bp, Homo sapiens
gctacaaagaatctgta

SEQ ID NO: 2263 - DNA, 17 bp, Homo sapiens
tacagattctttgtagc

SEQ ID NO: 2264 - DNA, 121 bp, Homo sapiens
atatggagagagatctagcttcaggactcattggccctctcctcatctgctacaaagaatctgtagatcaaagaggaaaccaggtgagttcttgcctttccaagtgctgggtttcattctc

SEQ ID NO: 2265 - DNA, 121 bp, Homo sapiens
gagaatgaaacccagcacttggaaaggcaagaactcacctggtttcctctttgatctacagattctttgtagcagatgaggagagggccaatgagtcctgaagctagatctctctccatat

SEQ ID NO: 2266 - DNA, 17 bp, Homo sapiens
caaagaatctgtagatc

SEQ ID NO: 2267 - DNA, 17 bp, Homo sapiens
gatctacagattctttg

SEQ ID NO: 2268 - DNA, 121 bp, Homo sapiens
tggagagagatctagcttcaggactcattggccctctcctcatctgctacaaagaatctgtagatcaaagaggaaaccaggtgagttcttgcctttccaagtgctgggtttcattctcagt

SEQ ID NO: 2269 - DNA, 121 bp, Homo sapiens
actgagaatgaaacccagcacttggaaaggcaagaactcacctggtttcctctttgatctacagattctttgtagcagatgaggagagggccaatgagtcctgaagctagatctctctcca

SEQ ID NO: 2270 - DNA, 17 bp, Homo sapiens
agaatctgtagatcaaa

SEQ ID NO: 2271 - DNA, 17 bp, Homo sapiens
tttgatctacagattct

SEQ ID NO: 2272 - DNA, 121 bp, Homo sapiens
atttcagtttttcttgatcatgaaaacgccaacaaaattctgaatcggccaaagaggtataattcaggtaaattggaagagtttgttcaagggaaccttgagagagaatgtatggaagaaa

SEQ ID NO: 2273 - DNA, 121 bp, Homo sapiens
tttcttccatacattctctctcaaggttcccttgaacaaactcttccaatttacctgaattatacctctttggccgattcagaattttgttggcgttttcatgatcaagaaaaactgaaat

SEQ ID NO: 2274 - DNA, 17 bp, Homo sapiens
agaggtataattcaggt

SEQ ID NO: 2275 - DNA, 17 bp, Homo sapiens
acctgaattatacctct

SEQ ID NO: 2276 - DNA, 121 bp, Homo sapiens
tttcagtttttcttgatcatgaaaacgccaacaaaattctgaatcggccaaagaggtataattcaggtaaattggaagagtttgttcaagggaaccttgagagagaatgtatggaagaaaa

SEQ ID NO: 2277 - DNA, 121 bp, Homo sapiens
ttttcttccatacattctctctcaaggttcccttgaacaaactcttccaatttacctgaattatacctctttggccgattcagaattttgttggcgttttcatgatcaagaaaaactgaaa

SEQ ID NO: 2278 - DNA, 17 bp, Homo sapiens
gaggtataattcaggta

SEQ ID NO: 2279 - DNA, 17 bp, Homo sapiens
tacctgaattatacctc

SEQ ID NO: 2280 - DNA, 121 bp, Homo sapiens; identical to SEQ ID NO: 2272

SEQ ID NO: 2281 - DNA, 121 bp, Homo sapiens; identical to SEQ ID NO: 2273

SEQ ID NO: 2282 - DNA, 17 bp, Homo sapiens
agaggtataattcaggt

SEQ ID NO: 2283 - DNA, 17 bp, Homo sapiens
acctgaattatacctct

SEQ ID NO: 2284 - DNA, 121 bp, Homo sapiens
tcagtttttcttgatcatgaaaacgccaacaaaattctgaatcggccaaagaggtataattcaggtaaattggaagagtttgttcaagggaaccttgagagagaatgtatggaagaaaagt

SEQ ID NO: 2285 - DNA, 121 bp, Homo sapiens
acttttcttccatacattctctctcaaggttcccttgaacaaactcttccaatttacctgaattatacctctttggccgattcagaattttgttggcgttttcatgatcaagaaaaactga

SEQ ID NO: 2286 - DNA, 17 bp, Homo sapiens
ggtataattcaggtaaa

SEQ ID NO: 2287 - DNA, 17 bp, Homo sapiens
tttacctgaattatacc

SEQ ID NO: 2288 - DNA, 121 bp, Homo sapiens
tttttcttgatcatgaaaacgccaacaaaattctgaatcggccaaagaggtataattcaggtaaattggaagagtttgttcaagggaaccttgagagagaatgtatggaagaaaagtgtag

SEQ ID NO: 2289 - DNA, 121 bp, Homo sapiens
ctacacttttcttccatacattctctctcaaggttcccttgaacaaactcttccaatttacctgaattatacctctttggccgattcagaattttgttggcgttttcatgatcaagaaaaa

SEQ ID NO: 2290 - DNA, 17 bp, Homo sapiens
taattcaggtaaattgg

SEQ ID NO: 2291 - DNA, 17 bp, Homo sapiens
ccaatttacctgaatta

SEQ ID NO: 2292 - DNA, 121 bp, Homo sapiens
gtttttcttgatcatgaaaacgccaacaaaattctgaatcggccaaagaggtataattcaggtaaattggaagagtttgttcaagggaaccttgagagagaatgtatggaagaaaagtgta

SEQ ID NO: 2293 - DNA, 121 bp, Homo sapiens
tacacttttcttccatacattctctctcaaggttcccttgaacaaactcttccaatttacctgaattatacctctttggccgattcagaattttgttggcgttttcatgatcaagaaaaac

SEQ ID NO: 2294 - DNA, 17 bp, Homo sapiens
ataattcaggtaaattg

SEQ ID NO: 2295 - DNA, 17 bp, Homo sapiens
caatttacctgaattat

SEQ ID NO: 2296 - DNA, 121 bp, Homo sapiens
tttcttgatcatgaaaacgccaacaaaattctgaatcggccaaagaggtataattcaggtaaattggaagagtttgttcaagggaaccttgagagagaatgtatggaagaaaagtgtagtt

SEQ ID NO: 2297 - DNA, 121 bp, Homo sapiens
aactacacttttcttccatacattctctctcaaggttcccttgaacaaactcttccaatttacctgaattatacctctttggccgattcagaattttgttggcgttttcatgatcaagaaa

SEQ ID NO: 2298 - DNA, 17 bp, Homo sapiens
attcaggtaaattggaa

SEQ ID NO: 2299 - DNA, 17 bp, Homo sapiens
ttccaatttacctgaat

SEQ ID NO: 2300 - DNA, 121 bp, Homo sapiens
atcatgaaaacgccaacaaaattctgaatcggccaaagaggtataattcaggtaaattggaagagtttgttcaagggaaccttgagagagaatgtatggaagaaaagtgtagttttgaaga

SEQ ID NO: 2301 - DNA, 121 bp, Homo sapiens
tcttcaaaactacacttttcttccatacattctctctcaaggttcccttgaacaaactcttccaatttacctgaattatacctctttggccgattcagaattttgttggcgttttcatgat

SEQ ID NO: 2302 - DNA, 17 bp, Homo sapiens
taaattggaagagtttg

SEQ ID NO: 2303 - DNA, 16 bp, Homo sapiens
caaactcttccmttta

SEQ ID NO: 2304 - DNA, 121 bp, Homo sapiens
gatcatgaaaacgccaacaaaattctgaatcggccaaagaggtataattcaggtaaattggaagagtttgttcaagggaaccttgagagagaatgtatggaagaaaagtgtagttttgaag

SEQ ID NO: 2305 - DNA, 121 bp, Homo sapiens
cttcaaaactacacttttcttccatacattctctctcaaggttcccttgaacaaactcttccaatttacctgaattatacctctttggccgattcagaattttgttggcgttttcatgatc

SEQ ID NO: 2306 - DNA, 17 bp, Homo sapiens
gtaaattggaagagttt

SEQ ID NO: 2307 - DNA, 17 bp, Homo sapiens
aaactcttccaatttac

SEQ ID NO: 2308 - DNA, 121 bp, Homo sapiens; identical to SEQ ID NO: 2300

SEQ ID NO: 2309 - DNA, 121 bp, Homo sapiens; identical to SEQ ID NO: 2301

SEQ ID NO: 2310 - DNA, 17 bp, Homo sapiens
taaattggaagagtttg

SEQ ID NO: 2311 - DNA, 17 bp, Homo sapiens
caaactcttccaattta

SEQ ID NO: 2312 - DNA, 121 bp, Homo sapiens
atgaaaacgccaacaaaattctgaatcggccaaagaggtataattcaggtaaattggaagagtttgttcaagggaaccttgagagagaatgtatggaagaaaagtgtagttttgaagaagc

SEQ ID NO: 2313 - DNA, 121 bp, Homo sapiens
gcttcttcaaaactacacttttcttccatacattctctctcaaggttcccttgaacaaactcttccaatttacctgaattatacctctttggccgattcagaattttgttggcgttttcat

SEQ ID NO: 2314 - DNA, 17 bp, Homo sapiens
attggaagagtttgttc

SEQ ID NO: 2315 - DNA, 17 bp, Homo sapiens
gaacaaactcttccaat

SEQ ID NO: 2316 - DNA, 121 bp, Homo sapiens; identical to SEQ ID NO: 2312

SEQ ID NO: 2317 - DNA, 121 bp, Homo sapiens; identical to SEQ ID NO: 2313

SEQ ID NO: 2318 - DNA, 17 bp, Homo sapiens
attggaagagtttgttc

SEQ ID NO: 2319 - DNA, 17 bp, Homo sapiens
gaacaaactcttccaat

SEQ ID NO: 2320 - DNA, 121 bp, Homo sapiens
aaaacgccaacaaaattctgaatcggccaaagaggtataattcaggtaaattggaagagtttgttcaagggaaccttgagagagaatgtatggaagaaaagtgtagttttgaagaagcacg

SEQ ID NO: 2321 - DNA, 121 bp, Homo sapiens
cgtgcttcttcaaaactacacttttcttccatacattctctctcaaggttcccttgaacaaactcttccaatttacctgaattatacctctttggccgattcagaattttgttggcgtttt

SEQ ID NO: 2322 - DNA, 17 bp, Homo sapiens
ggaagagtttgttcaag

SEQ ID NO: 2323 - DNA, 17 bp, Homo sapiens
cttgaacaaactcttcc

SEQ ID NO: 2324 - DNA, 121 bp, Homo sapiens
gaaaacgccaacaaaattctgaatcggccaaagaggtataattcaggtaaattggaagagtttgttcaagggaaccttgagagagaatgtatggaagaaaagtgtagttttgaagaagcac

SEQ ID NO: 2325 - DNA, 121 bp, Homo sapiens
gtgcttcttcaaaactacacttttcttccatacattctctctcaaggttcccttgaacaaactcttccaatttacctgaattatacctctttggccgattcagaattttgttggcgttttc

SEQ ID NO: 2326 - DNA, 17 bp, Homo sapiens
tggaagagtttgttcaa

SEQ ID NO: 2327 - DNA, 17 bp, Homo sapiens
ttgaacaaactcttcca

SEQ ID NO: 2328 - DNA, 121 bp, Homo sapiens
ttacatttcagtttttcttgatcatgaaaacgccaacaaaattctgaatcggccaaagaggtataattcaggtaaattggaagagtttgttcaagggaaccttgagagagaatgtatggaa

SEQ ID NO: 2329 - DNA, 121 bp, Homo sapiens
ttccatacattctctctcaaggttcccttgaacaaactcttccaatttacctgaattatacctctttggccgattcagaattttgttggcgttttcatgatcaagaaaaactgaaatgtaa

SEQ ID NO: 2330 - DNA, 17 bp, Homo sapiens
ccaaagaggtataattc

SEQ ID NO: 2331 - DNA, 17 bp, Homo sapiens
gaattatacctctttgg

SEQ ID NO: 2332 - DNA, 121 bp, Homo sapiens
tttacatttcagtttttcttgatcatgaaaacgccaacaaaattctgaatcggccaaagaggtataattcaggtaaattggaagagtttgttcaagggaaccttgagagagaatgtatgga

SEQ ID NO: 2333 - DNA, 121 bp, Homo sapiens
tccatacattctctctcaaggttcccttgaacaaactcttccaatttacctgaattatacctctttggccgattcagaattttgttggcgttttcatgatcaagaaaaactgaaatgtaaa

SEQ ID NO: 2334 - DNA, 17 bp, Homo sapiens
gccaaagaggtataatt

SEQ ID NO: 2335 - DNA, 17 bp, Homo sapiens
aattatacctctttggc

SEQ ID NO: 2336 - DNA, 121 bp, Homo sapiens
cttttacatttcagtttttcttgatcatgaaaacgccaacaaaattctgaatcggccaaagaggtataattcaggtaaattggaagagtttgttcaagggaaccttgagagagaatgtatg

SEQ ID NO: 2337 - DNA, 121 bp, Homo sapiens
catacattctctctcaaggttcccttgaacaaactcttccaatttacctgaattatacctctttggccgattcagaattttgttggcgttttcatgatcaagaaaaactgaaatgtaaaag

SEQ ID NO: 2338 - DNA, 17 bp, Homo sapiens
cggccaaagaggtataa

SEQ ID NO: 2339 - DNA, 17 bp, Homo sapiens
ttatacctctttggccg

SEQ ID NO: 2340 - DNA, 121 bp, Homo sapiens
aattattcttttacatttcagtttttcttgatcatgaaaacgccaacaaaattctgaatcggccaaagaggtataattcaggtaaattggaagagtttgttcaagggaaccttgagagaga

SEQ ID NO: 2341 - DNA, 121 bp, Homo sapiens
tctctctcaaggttcccttgaacaaactcttccaatttacctgaattatacctctttggccgattcagaattttgttggcgttttcatgatcaagaaaaactgaaatgtaaaagaataatt

SEQ ID NO: 2342 - DNA, 17 bp, Homo sapiens
tctgaatcggccaaaga

SEQ ID NO: 2343 - DNA, 17 bp, Homo sapiens
tctttggccgattcaga

SEQ ID NO: 2344 - DNA, 121 bp, Homo sapiens; identical to SEQ ID NO: 2340

SEQ ID NO: 2345 - DNA, 121 bp, Homo sapiens; identical to SEQ ID NO: 2341

SEQ ID NO: 2346 - DNA, 17 bp, Homo sapiens
tctgaatcggccaaaga

SEQ ID NO: 2347 - DNA, 17 bp, Homo sapiens
tctttggccgattcaga

SEQ ID NO: 2348 - DNA, 121 bp, Homo sapiens
gaattattcttttacatttcagtttttcttgatcatgaaaacgccaacaaaattctgaatcggccaaagaggtataattcaggtaaattggaagagtttgttcaagggaaccttgagagag

SEQ ID NO: 2349 - DNA, 121 bp, Homo sapiens
ctctctcaaggttcccttgaacaaactcttccaatttacctgaattatacctctttggccgattcagaattttgttggcgttttcatgatcaagaaaaactgaaatgtaaaagaataattc

SEQ ID NO: 2350 - DNA, 17 bp, Homo sapiens
ttctgaatcggccaaag

SEQ ID NO: 2351 - DNA, 17 bp, Homo sapiens
ctttggccgattcagaa

SEQ ID NO: 2352 - DNA, 121 bp, Homo sapiens
gccaacaaaattctgaatcggccaaagaggtataattcaggtaaattggaagagtttgttcaagggaaccttgagagagaatgtatggaagaaaagtgtagttttgaagaagcacgagaag

SEQ ID NO: 2353 - DNA, 121 bp, Homo sapiens
cttctcgtgcttcttcaaaactacacttttcttccatacattctctctcaaggttcccttgaacaaactcttccaatttacctgaattatacctctttggccgattcagaattttgttggc

SEQ ID NO: 2354 - DNA, 17 bp, Homo sapiens
agtttgttcaagggaac

SEQ ID NO: 2355 - DNA, 17 bp, Homo sapiens
gttcccttgaacaaact

SEQ ID NO: 2356 - DNA, 121 bp, Homo sapiens
acaaaattctgaatcggccaaagaggtataattcaggtaaattggaagagtttgttcaagggaaccttgagagagaatgtatggaagaaaagtgtagttttgaagaagcacgagaagtttt

SEQ ID NO: 2357 - DNA, 121 bp, Homo sapiens
aaaacttctcgtgcttcttcaaaactacacttttcttccatacattctctctcaaggttcccttgaacaaactcttccaatttacctgaattatacctctttggccgattcagaattttgt

SEQ ID NO: 2358 - DNA, 17 bp, Homo sapiens
tgttcaagggaaccttg

SEQ ID NO: 2359 - DNA, 17 bp, Homo sapiens
caaggttcccttgaaca

SEQ ID NO: 2360 - DNA, 121 bp, Homo sapiens
aacaaaattctgaatcggccaaagaggtataattcaggtaaattggaagagtttgttcaagggaaccttgagagagaatgtatggaagaaaagtgtagttttgaagaagcacgagaagttt

SEQ ID NO: 2361 - DNA, 121 bp, Homo sapiens
aaacttctcgtgcttcttcaaaactacacttttcttccatacattctctctcaaggttcccttgaacaaactcttccaatttacctgaattatacctctttggccgattcagaattttgtt

SEQ ID NO: 2362 - DNA, 17 bp, Homo sapiens
ttgttcaagggaacctt

SEQ ID NO: 2363 - DNA, 17 bp, Homo sapiens
aaggttcccttgaacaa

SEQ ID NO: 2364 - DNA, 121 bp, Homo sapiens; identical to SEQ ID NO: 2356

SEQ ID NO: 2365 - DNA, 121 bp, Homo sapiens; identical to SEQ ID NO: 2357

SEQ ID NO: 2366 - DNA, 17 bp, Homo sapiens
tgttcaagggaaccttg

SEQ ID NO: 2367 - DNA, 17 bp, Homo sapiens
caaggttcccttgaaca

SEQ ID NO: 2368 - DNA, 121 bp, Homo sapiens
cggccaaagaggtataattcaggtaaattggaagagtttgttcaagggaaccttgagagagaatgtatggaagaaaagtgtagttttgaagaagcacgagaagtttttgaaaacactgaaa

SEQ ID NO: 2369 - DNA, 121 bp, Homo sapiens
tttcagtgttttcaaaaacttctcgtgcttcttcaaaactacacttttcttccatacattctctctcaaggttcccttgaacaaactcttccaatttacctgaattatacctctttggccg

SEQ ID NO: 2370 - DNA, 17 bp, Homo sapiens
ttgagagagaatgtatg

SEQ ID NO: 2371 - DNA, 17 bp, Homo sapiens
catacattctctctcaa

SEQ ID NO: 2372 - DNA, 121 bp, Homo sapiens; identical to SEQ ID NO: 2368

SEQ ID NO: 2373 - DNA, 121 bp, Homo sapiens; identical to SEQ ID NO: 2369

SEQ ID NO: 2374 - DNA, 17 bp, Homo sapiens
ttgagagagaatgtatg

SEQ ID NO: 2375 - DNA, 17 bp, Homo sapiens
catacattctctctcaa

SEQ ID NO: 2376 - DNA, 121 bp, Homo sapiens
ccaaagaggtataattcaggtaaattggaagagtttgttcaagggaaccttgagagagaatgtatggaagaaaagtgtagttttgaagaagcacgagaagtttttgaaaacactgaaagaa

SEQ ID NO: 2377 - DNA, 121 bp, Homo sapiens
ttctttcagtgttttcaaaaacttctcgtgcttcttcaaaactacacttttcttccatacattctctctcaaggttcccttgaacaaactcttccaatttacctgaattatacctctttgg

SEQ ID NO: 2378 - DNA, 17 bp, Homo sapiens
agagagaatgtatggaa

SEQ ID NO: 2379 - DNA, 17 bp, Homo sapiens
ttccatacattctctct

SEQ ID NO: 2380 - DNA, 121 bp, Homo sapiens
caaagaggtataattcaggtaaattggaagagtttgttcaagggaaccttgagagagaatgtatggaagaaaagtgtagttttgaagaagcacgagaagtttttgaaaacactgaaagaac

SEQ ID NO: 2381 - DNA, 121 bp, Homo sapiens
gttctttcagtgttttcaaaaacttctcgtgcttcttcaaaactacacttttcttccatacattctctctcaaggttcccttgaacaaactcttccaatttacctgaattatacctctttg

SEQ ID NO: 2382 - DNA, 17 bp, Homo sapiens
gagagaatgtatggaag

SEQ ID NO: 2383 - DNA, 17 bp, Homo sapiens
cttccatacattctctc

SEQ ID NO: 2384 - DNA, 121 bp, Homo sapiens
ggtataattcaggtaaattggaagagtttgttcaagggaaccttgagagagaatgtatggaagaaaagtgtagttttgaagaagcacgagaagtttttgaaaacactgaaagaacagtgag

SEQ ID NO: 2385 - DNA, 121 bp, Homo sapiens
ctcactgttctttcagtgttttcaaaaacttctcgtgcttcttcaaaactacacttttcttccatacattctctctcaaggttcccttgaacaaactcttccaatttacctgaattatacc

SEQ ID NO: 2386 - DNA, 17 bp, Homo sapiens
atgtatggaagaaaagt

SEQ ID NO: 2387 - DNA, 17 bp, Homo sapiens
acttttcttccatacat

SEQ ID NO: 2388 - DNA, 121 bp, Homo sapiens
tataattcaggtaaattggaagagtttgttcaagggaaccttgagagagaatgtatggaagaaaagtgtagttttgaagaagcacgagaagtttttgaaaacactgaaagaacagtgagta

SEQ ID NO: 2389 - DNA, 121 bp, Homo sapiens
tactcactgttctttcagtgttttcaaaaacttctcgtgcttcttcaaaactacacttttcttccatacattctctctcaaggttcccttgaacaaactcttccaatttacctgaattata

SEQ ID NO: 2390 - DNA, 17 bp, Homo sapiens
gtatggaagaaaagtgt

SEQ ID NO: 2391 - DNA, 17 bp, Homo sapiens
acacttttcttccatac

SEQ ID NO: 2392 - DNA, 121 bp, Homo sapiens
tcaggtaaattggaagagtttgttcaagggaaccttgagagagaatgtatggaagaaaagtgtagttttgaagaagcacgagaagtttttgaaaacactgaaagaacagtgagtatttcca

SEQ ID NO: 2393 - DNA, 121 bp, Homo sapiens
tggaaatactcactgttctttcagtgttttcaaaaacttctcgtgcttcttcaaaactacacttttcttccatacattctctctcaaggttcccttgaacaaactcttccaatttacctga

SEQ ID NO: 2394 - DNA, 17 bp, Homo sapiens
aagaaaagtgtagtttt

SEQ ID NO: 2395 - DNA, 17 bp, Homo sapiens
aaaactacacttttctt

SEQ ID NO: 2396 - DNA, 121 bp, Homo sapiens
caggtaaattggaagagtttgttcaagggaaccttgagagagaatgtatggaagaaaagtgtagttttgaagaagcacgagaagtttttgaaaacactgaaagaacagtgagtatttccac

SEQ ID NO: 2397 - DNA, 121 bp, Homo sapiens
gtggaaatactcactgttctttcagtgttttcaaaaacttctcgtgcttcttcaaaactacacttttcttccatacattctctctcaaggttcccttgaacaaactcttccaatttacctg

SEQ ID NO: 2398 - DNA, 17 bp, Homo sapiens
agaaaagtgtagttttg

SEQ ID NO: 2399 - DNA, 17 bp, Homo sapiens
caaaactacacttttct

SEQ ID NO: 2400 - DNA, 121 bp, Homo sapiens
aattggaagagtttgttcaagggaaccttgagagagaatgtatggaagaaaagtgtagttttgaagaagcacgagaagtttttgaaaacactgaaagaacagtgagtatttccacataata

SEQ ID NO: 2401 - DNA, 121 bp, Homo sapiens
tattatgtggaaatactcactgttctttcagtgttttcaaaaacttctcgtgcttcttcaaaactacacttttcttccatacattctctctcaaggttcccttgaacaaactcttccaatt

SEQ ID NO: 2402 - DNA, 17 bp, Homo sapiens
gtgtagttttgaagaag

SEQ ID NO: 2403 - DNA, 17 bp, Homo sapiens
cttcttcaaaactacac

SEQ ID NO: 2404 - DNA, 121 bp, Homo sapiens
ttggaagagtttgttcaagggaaccttgagagagaatgtatggaagaaaagtgtagttttgaagaagcacgagaagtttttgaaaacactgaaagaacagtgagtatttccacataatacc

SEQ ID NO: 2405 - DNA, 121 bp, Homo sapiens
ggtattatgtggaaatactcactgttctttcagtgttttcaaaaacttctcgtgcttcttcaaaactacacttttcttccatacattctctctcaaggttcccttgaacaaactcttccaa

SEQ ID NO: 2406 - DNA, 17 bp, Homo sapiens
gtagttttgaagaagca

SEQ ID NO: 2407 - DNA, 17 bp, Homo sapiens
tgcttcttcaaaactac

SEQ ID NO: 2408 - DNA, 121 bp, Homo sapiens
aagagtttgttcaagggaaccttgagagagaatgtatggaagaaaagtgtagttttgaagaagcacgagaagtttttgaaaacactgaaagaacagtgagtatttccacataatacccttc

SEQ ID NO: 2409 - DNA, 121 bp, Homo sapiens
gaagggtattatgtggaaatactcactgttctttcagtgttttcaaaaacttctcgtgcttcttcaaaactacacttttcttccatacattctctctcaaggttcccttgaacaaactctt

SEQ ID NO: 2410 - DNA, 17 bp, Homo sapiens
ttttgaagaagcacgag

SEQ ID NO: 2411 - DNA, 17 bp, Homo sapiens
ctcgtgcttcttcaaaa

SEQ ID NO: 2412 - DNA, 121 bp, Homo sapiens
agagtttgttcaagggaaccttgagagagaatgtatggaagaaaagtgtagttttgaagaagcacgagaagtttttgaaaacactgaaagaacagtgagtatttccacataatacccttca

SEQ ID NO: 2413 - DNA, 121 bp, Homo sapiens
tgaagggtattatgtggaaatactcactgttctttcagtgttttcaaaaacttctcgtgcttcttcaaaactacacttttcttccatacattctctctcaaggttcccttgaacaaactct

SEQ ID NO: 2414 - DNA, 17 bp, Homo sapiens
tttgaagaagcacgaga

SEQ ID NO: 2415 - DNA, 17 bp, Homo sapiens
tctcgtgcttcttcaaa

SEQ ID NO: 2416 - DNA, 121 bp, Homo sapiens
gaagagtttgttcaagggaaccttgagagagaatgtatggaagaaaagtgtagttttgaagaagcacgagaagtttttgaaaacactgaaagaacagtgagtatttccacataataccctt

SEQ ID NO: 2417 - DNA, 121 bp, Homo sapiens
aagggtattatgtggaaatactcactgttctttcagtgttttcaaaaacttctcgtgcttcttcaaaactacacttttcttccatacattctctctcaaggttcccttgaacaaactcttc

SEQ ID NO: 2418 - DNA, 17 bp, Homo sapiens
gttttgaagaagcacga

SEQ ID NO: 2419 - DNA, 17 bp, Homo sapiens
tcgtgcttcttcaaaac

SEQ ID NO: 2420 - DNA, 121 bp, Homo sapiens; identical to SEQ ID NO: 2408

SEQ ID NO: 2421 - DNA, 121 bp, Homo sapiens; identical to SEQ ID NO: 2409

SEQ ID NO: 2422 - DNA, 17 bp, Homo sapiens
ttttgaagaagcacgag

SEQ ID NO: 2423 - DNA, 17 bp, Homo sapiens
ctcgtgcttcttcaaaa

SEQ ID NO: 2424 - DNA, 121 bp, Homo sapiens
ttgttcaagggaaccttgagagagaatgtatggaagaaaagtgtagttttgaagaagcacgagaagtttttgaaaacactgaaagaacagtgagtatttccacataatacccttcagatgc

SEQ ID NO: 2425 - DNA, 121 bp, Homo sapiens
gcatctgaagggtattatgtggaaatactcactgttctttcagtgttttcaaaaacttctcgtgcttcttcaaaactacacttttcttccatacattctctctcaaggttcccttgaacaa

SEQ ID NO: 2426 - DNA, 17 bp, Homo sapiens
agaagcacgagaagttt

SEQ ID NO: 2427 - DNA, 17 bp, Homo sapiens
aaacttctcgtgcttct

SEQ ID NO: 2428 - DNA, 121 bp, Homo sapiens; identical to SEQ ID NO: 2424

SEQ ID NO: 2429 - DNA, 121 bp, Homo sapiens; identical to SEQ ID NO: 2425

SEQ ID NO: 2430 - DNA, 17 bp, Homo sapiens
agaagcacgagaagttt

SEQ ID NO: 2431 - DNA, 17 bp, Homo sapiens
aaacttctcgtgcttct

SEQ ID NO: 2432 - DNA, 121 bp, Homo sapiens
tttgttcaagggaaccttgagagagaatgtatggaagaaaagtgtagttttgaagaagcacgagaagtttttgaaaacactgaaagaacagtgagtatttccacataatacccttcagatg

SEQ ID NO: 2433 - DNA, 121 bp, Homo sapiens
catctgaagggtattatgtggaaatactcactgttctttcagtgttttcaaaaacttctcgtgcttcttcaaaactacacttttcttccatacattctctctcaaggttcccttgaacaaa

SEQ ID NO: 2434 - DNA, 17 bp, Homo sapiens
aagaagcacgagaagtt

SEQ ID NO: 2435 - DNA, 17 bp, Homo sapiens
aacttctcgtgcttctt

SEQ ID NO: 2436 - DNA, 121 bp, Homo sapiens
gttcaagggaaccttgagagagaatgtatggaagaaaagtgtagttttgaagaagcacgagaagtttttgaaaacactgaaagaacagtgagtatttccacataatacccttcagatgcag

SEQ ID NO: 2437 - DNA, 121 bp, Homo sapiens
ctgcatctgaagggtattatgtggaaatactcactgttctttcagtgttttcaaaaacttctcgtgcttcttcaaaactacacttttcttccatacattctctctcaaggttcccttgaac

SEQ ID NO: 2438 - DNA, 17 bp, Homo sapiens
aagcacgagaagttttt

SEQ ID NO: 2439 - DNA, 17 bp, Homo sapiens
aaaaacttctcgtgctt

SEQ ID NO: 2440 - DNA, 121 bp, Homo sapiens; identical to SEQ ID NO: 2436

SEQ ID NO: 2441 - DNA, 121 bp, Homo sapiens; identical to SEQ ID NO: 2437

SEQ ID NO: 2442 - DNA, 17 bp, Homo sapiens
aagcacgagaagttttt

SEQ ID NO: 2443 - DNA, 17 bp, Homo sapiens
aaaaacttctcgtgctt

SEQ ID NO: 2444 - DNA, 121 bp, Homo sapiens
ccttgagagagaatgtatggaagaaaagtgtagttttgaagaagcacgagaagtttttgaaaacactgaaagaacagtgagtatttccacataatacccttcagatgcagagcatagaata

SEQ ID NO: 2445 - DNA, 121 bp, Homo sapiens
tattctatgctctgcatctgaagggtattatgtggaaatactcactgttctttcagtgttttcaaaaacttctcgtgcttcttcaaaactacacttttcttccatacattctctctcaagg

SEQ ID NO: 2446 - DNA, 17 bp, Homo sapiens
gtttttgaaaacactga

SEQ ID NO: 2447 - DNA, 17 bp, Homo sapiens
tcagtgttttcaaaaac

SEQ ID NO: 2448 - DNA, 121 bp, Homo sapiens
aaccttgagagagaatgtatggaagaaaagtgtagttttgaagaagcacgagaagtttttgaaaacactgaaagaacagtgagtatttccacataatacccttcagatgcagagcatagaa

SEQ ID NO: 2449 - DNA, 121 bp, Homo sapiens
ttctatgctctgcatctgaagggtattatgtggaaatactcactgttctttcagtgttttcaaaaacttctcgtgcttcttcaaaactacacttttcttccatacattctctctcaaggtt

SEQ ID NO: 2450 - DNA, 17 bp, Homo sapiens
aagtttttgaaaacact

SEQ ID NO: 2451 - DNA, 17 bp, Homo sapiens
agtgttttcaaaaactt

SEQ ID NO: 2452 - DNA, 121 bp, Homo sapiens
caaaacactttagatattaccgttaatttgtcttcttttattctttatagactgaattttggaagcagtatgttggtaagcaattcattttatcctctagctaatatatgaaacatatgag

SEQ ID NO: 2453 - DNA, 121 bp, Homo sapiens
ctcatatgtttcatatattagctagaggataaaatgaattgcttaccaacatactgcttccaaaattcagtctataaagaataaaagaagacaaattaacggtaatatctaaagtgttttg

SEQ ID NO: 2454 - DNA, 17 bp, Homo sapiens
tgaattttggaagcagt

SEQ ID NO: 2455 - DNA, 17 bp, Homo sapiens
actgcttccaaaattca

SEQ ID NO: 2456 - DNA, 121 bp, Homo sapiens
aaacactttagatattaccgttaatttgtcttcttttattctttatagactgaattttggaagcagtatgttggtaagcaattcattttatcctctagctaatatatgaaacatatgagaa

SEQ ID NO: 2457 - DNA, 121 bp, Homo sapiens
ttctcatatgtttcatatattagctagaggataaaatgaattgcttaccaacatactgcttccaaaattcagtctataaagaataaaagaagacaaattaacggtaatatctaaagtgttt

SEQ ID NO: 2458 - DNA, 17 bp, Homo sapiens
aattttggaagcagtat

SEQ ID NO: 2459 - DNA, 17 bp, Homo sapiens
atactgcttccaaaatt

SEQ ID NO: 2460 - DNA, 121 bp, Homo sapiens
cactttagatattaccgttaatttgtcttcttttattctttatagactgaattttggaagcagtatgttggtaagcaattcattttatcctctagctaatatatgaaacatatgagaatta

SEQ ID NO: 2461 - DNA, 121 bp, Homo sapiens
taattctcatatgtttcatatattagctagaggataaaatgaattgcttaccaacatactgcttccaaaattcagtctataaagaataaaagaagacaaattaacggtaatatctaaagtg

SEQ ID NO: 2462 - DNA, 17 bp, Homo sapiens
tttggaagcagtatgtt

SEQ ID NO: 2463 - DNA, 17 bp, Homo sapiens
aacatactgcttccaaa

SEQ ID NO: 2464 - DNA, 121 bp, Homo sapiens
ccgggcattctaagcagtttacgtgccaattcaatttcttaacctatctcaaagatggagatcagtgtgagtccaatccatgtttaaatggcggcagttgcaaggatgacattaattccta

SEQ ID NO: 2465 - DNA, 121 bp, Homo sapiens
taggaattaatgtcatccttgcaactgccgccatttaaacatggattggactcacactgatctccatctttgagataggttaagaaattgaattggcacgtaaactgcttagaatgcccgg

SEQ ID NO: 2466 - DNA, 17 bp, Homo sapiens
agatggagatcagtgtg

SEQ ID NO: 2467 - DNA, 17 bp, Homo sapiens
cacactgatctccatct

SEQ ID NO: 2468 - DNA, 121 bp, Homo sapiens
gcattctaagcagtttacgtgccaattcaatttcttaacctatctcaaagatggagatcagtgtgagtccaatccatgtttaaatggcggcagttgcaaggatgacattaattcctatgaa

SEQ ID NO: 2469 - DNA, 121 bp, Homo sapiens
ttcataggaattaatgtcatccttgcaactgccgccatttaaacatggattggactcacactgatctccatctttgagataggttaagaaattgaattggcacgtaaactgcttagaatgc

SEQ ID NO: 2470 - DNA, 17 bp, Homo sapiens
ggagatcagtgtgagtc

SEQ ID NO: 2471 - DNA, 17 bp, Homo sapiens
gactcacactgatctcc

SEQ ID NO: 2472 - DNA, 121 bp, Homo sapiens
ggcattctaagcagtttacgtgccaattcaatttcttaacctatctcaaagatggagatcagtgtgagtccaatccatgtttaaatggcggcagttgcaaggatgacattaattcctatga

SEQ ID NO: 2473 - DNA, 121 bp, Homo sapiens
tcataggaattaatgtcatccttgcaactgccgccatttaaacatggattggactcacactgatctccatctttgagataggttaagaaattgaattggcacgtaaactgcttagaatgcc

SEQ ID NO: 2474 - DNA, 17 bp, Homo sapiens
tggagatcagtgtgagt

SEQ ID NO: 2475 - DNA, 17 bp, Homo sapiens
actcacactgatctcca

SEQ ID NO: 2476 - DNA, 121 bp, Homo sapiens
gggcattctaagcagtttacgtgccaattcaatttcttaacctatctcaaagatggagatcagtgtgagtccaatccatgtttaaatggcggcagttgcaaggatgacattaattcctatg

SEQ ID NO: 2477 - DNA, 121 bp, Homo sapiens
cataggaattaatgtcatccttgcaactgccgccatttaaacatggattggactcacactgatctccatctttgagataggttaagaaattgaattggcacgtaaactgcttagaatgccc

SEQ ID NO: 2478 - DNA, 17 bp, Homo sapiens
atggagatcagtgtgag

SEQ ID NO: 2479 - DNA, 17 bp, Homo sapiens
ctcacactgatctccat

SEQ ID NO: 2480 - DNA, 121 bp, Homo sapiens
cattctaagcagtttacgtgccaattcaatttcttaacctatctcaaagatggagatcagtgtgagtccaatccatgtttaaatggcggcagttgcaaggatgacattaattcctatgaat

SEQ ID NO: 2481 - DNA, 121 bp, Homo sapiens
attcataggaattaatgtcatccttgcaactgccgccatttaaacatggattggactcacactgatctccatctttgagataggttaagaaattgaattggcacgtaaactgcttagaatg

SEQ ID NO: 2482 - DNA, 17 bp, Homo sapiens
gagatcagtgtgagtcc

SEQ ID NO: 2483 - DNA, 17 bp, Homo sapiens
ggactcacactgatctc

SEQ ID NO: 2484 - DNA, 121 bp, Homo sapiens; identical to SEQ ID NO: 2480

SEQ ID NO: 2485 - DNA, 121 bp, Homo sapiens; identical to SEQ ID NO: 2481

SEQ ID NO: 2486 - DNA, 17 bp, Homo sapiens
gagatcagtgtgagtcc

SEQ ID NO: 2487 - DNA, 17 bp, Homo sapiens
ggactcacactgatctc

SEQ ID NO: 2488 - DNA, 121 bp, Homo sapiens
ttctaagcagtttacgtgccaattcaatttcttaacctatctcaaagatggagatcagtgtgagtccaatccatgtttaaatggcggcagttgcaaggatgacattaattcctatgaatgt

SEQ ID NO: 2489 - DNA, 121 bp, Homo sapiens
acattcataggaattaatgtcatccttgcaactgccgccatttaaacatggattggactcacactgatctccatctttgagataggttaagaaattgaattggcacgtaaactgcttagaa

SEQ ID NO: 2490 - DNA, 17 bp, Homo sapiens
gatcagtgtgagtccaa

SEQ ID NO: 2491 - DNA, 17 bp, Homo sapiens
ttggactcacactgatc

SEQ ID NO: 2492 - DNA, 121 bp, Homo sapiens
tctaagcagtttacgtgccaattcaatttcttaacctatctcaaagatggagatcagtgtgagtccaatccatgtttaaatggcggcagttgcaaggatgacattaattcctatgaatgtt

SEQ ID NO: 2493 - DNA, 121 bp, Homo sapiens
aacattcataggaattaatgtcatccttgcaactgccgccatttaaacatggattggactcacactgatctccatctttgagataggttaagaaattgaattggcacgtaaactgcttaga

SEQ ID NO: 2494 - DNA, 17 bp, Homo sapiens
atcagtgtgagtccaat

SEQ ID NO: 2495 - DNA, 17 bp, Homo sapiens
attggactcacactgat

SEQ ID NO: 2496 - DNA, 121 bp, Homo sapiens
tttacgtgccaattcaatttcttaacctatctcaaagatggagatcagtgtgagtccaatccatgtttaaatggcggcagttgcaaggatgacattaattcctatgaatgttggtgtccct

SEQ ID NO: 2497 - DNA, 121 bp, Homo sapiens
agggacaccaacattcataggaattaatgtcatccttgcaactgccgccatttaaacatggattggactcacactgatctccatctttgagataggttaagaaattgaattggcacgtaaa

SEQ ID NO: 2498 - DNA, 17 bp, Homo sapiens
agtccaatccatgttta

SEQ ID NO: 2499 - DNA, 17 bp, Homo sapiens
taaacatggattggact

SEQ ID NO: 2500 - DNA, 121 bp, Homo sapiens
ttacgtgccaattcaatttcttaacctatctcaaagatggagatcagtgtgagtccaatccatgtttaaatggcggcagttgcaaggatgacattaattcctatgaatgttggtgtccctt

SEQ ID NO: 2501 - DNA, 121 bp, Homo sapiens
aagggacaccaacattcataggaattaatgtcatccttgcaactgccgccatttaaacatggattggactcacactgatctccatctttgagataggttaagaaattgaattggcacgtaa

SEQ ID NO: 2502 - DNA, 17 bp, Homo sapiens
gtccaatccatgtttaa

SEQ ID NO: 2503 - DNA, 17 bp, Homo sapiens
ttaaacatggattggac

SEQ ID NO: 2504 - DNA, 121 bp, Homo sapiens; identical to SEQ ID NO: 2500

SEQ ID NO: 2505 - DNA, 121 bp, Homo sapiens; identical to SEQ ID NO: 2501

SEQ ID NO: 2506 - DNA, 17 bp, Homo sapiens
gtccaatccatgtttaa

SEQ ID NO: 2507 - DNA, 17 bp, Homo sapiens
ttaaacatggattggac

SEQ ID NO: 2508 - DNA, 121 bp, Homo sapiens; identical to SEQ ID NO: 2500

SEQ ID NO: 2509 - DNA, 121 bp, Homo sapiens; identical to SEQ ID NO: 2501

SEQ ID NO: 2510 - DNA, 17 bp, Homo sapiens
gtccaatccatgtttaa

SEQ ID NO: 2511 - DNA, 17 bp, Homo sapiens
ttaaacatggattggac

SEQ ID NO: 2512 - DNA, 121 bp, Homo sapiens; identical to SEQ ID NO: 2496

SEQ ID NO: 2513 - DNA, 121 bp, Homo sapiens; identical to SEQ ID NO: 2497

SEQ ID NO: 2514 - DNA, 17 bp, Homo sapiens
agtccaatccatgttta

SEQ ID NO: 2515 - DNA, 17 bp, Homo sapiens
taaacatggattggact

SEQ ID NO: 2516 - DNA, 121 bp, Homo sapiens
acgtgccaattcaatttcttaacctatctcaaagatggagatcagtgtgagtccaatccatgtttaaatggcggcagttgcaaggatgacattaattcctatgaatgttggtgtccctttg

SEQ ID NO: 2517 - DNA, 121 bp, Homo sapiens
caaagggacaccaacattcataggaattaatgtcatccttgcaactgccgccatttaaacatggattggactcacactgatctccatctttgagataggttaagaaattgaattggcacgt

SEQ ID NO: 2518 - DNA, 17 bp, Homo sapiens
ccaatccatgtttaaat

SEQ ID NO: 2519 - DNA, 17 bp, Homo sapiens
atttaaacatggattgg

SEQ ID NO: 2520 - DNA, 121 bp, Homo sapiens; identical to SEQ ID NO: 2516

SEQ ID NO: 2521 - DNA, 121 bp, Homo sapiens; identical to SEQ ID NO: 2517

SEQ ID NO: 2522 - DNA, 17 bp, Homo sapiens
ccaatccatgtttaaat

SEQ ID NO: 2523 - DNA, 17 bp, Homo sapiens
atttaaacatggattgg

SEQ ID NO: 2524 - DNA, 121 bp, Homo sapiens
cgtgccaattcaatttcttaacctatctcaaagatggagatcagtgtgagtccaatccatgtttaaatggcggcagttgcaaggatgacattaattcctatgaatgttggtgtccctttgg

SEQ ID NO: 2525 - DNA, 121 bp, Homo sapiens
ccaaagggacaccaacattcataggaattaatgtcatccttgcaactgccgccatttaaacatggattggactcacactgatctccatctttgagataggttaagaaattgaattggcacg

SEQ ID NO: 2526 - DNA, 17 bp, Homo sapiens
caatccatgtttaaatg

SEQ ID NO: 2527 - DNA, 17 bp, Homo sapiens
catttaaacatggattg

SEQ ID NO: 2528 - DNA, 121 bp, Homo sapiens; identical to SEQ ID NO: 2524

SEQ ID NO: 2529 - DNA, 121 bp, Homo sapiens; identical to SEQ ID NO: 2525

SEQ ID NO: 2530 - DNA, 17 bp, Homo sapiens
caatccatgtttaaatg

SEQ ID NO: 2531 - DNA, 17 bp, Homo sapiens
catttaaacatggattg

SEQ ID NO: 2532 - DNA, 121 bp, Homo sapiens
attcaatttcttaacctatctcaaagatggagatcagtgtgagtccaatccatgtttaaatggcggcagttgcaaggatgacattaattcctatgaatgttggtgtccctttggatttgaa

SEQ ID NO: 2533 - DNA, 121 bp, Homo sapiens
ttcaaatccaaagggacaccaacattcataggaattaatgtcatccttgcaactgccgccatttaaacatggattggactcacactgatctccatctttgagataggttaagaaattgaat

SEQ ID NO: 2534 - DNA, 17 bp, Homo sapiens
tgtttaaatggcggcag

SEQ ID NO: 2535 - DNA, 17 bp, Homo sapiens
ctgccgccatttaaaca

SEQ ID NO: 2536 - DNA, 121 bp, Homo sapiens
tcaatttcttaacctatctcaaagatggagatcagtgtgagtccaatccatgtttaaatggcggcagttgcaaggatgacattaattcctatgaatgttggtgtccctttggatttgaagg

SEQ ID NO: 2537 - DNA, 121 bp, Homo sapiens
ccttcaaatccaaagggacaccaacattcataggaattaatgtcatccttgcaactgccgccatttaaacatggattggactcacactgatctccatctttgagataggttaagaaattga

SEQ ID NO: 2538 - DNA, 17 bp, Homo sapiens
tttaaatggcggcagtt

SEQ ID NO: 2539 - DNA, 17 bp, Homo sapiens
aactgccgccatttaaa

SEQ ID NO: 2540 - DNA, 121 bp, Homo sapiens; identical to SEQ ID NO: 2536

SEQ ID NO: 2541 - DNA, 121 bp, Homo sapiens; identical to SEQ ID NO: 2537

SEQ ID NO: 2542 - DNA, 17 bp, Homo sapiens
tttaaatggcggcagtt

SEQ ID NO: 2543 - DNA, 17 bp, Homo sapiens
aactgccgccatttaaa

SEQ ID NO: 2544 - DNA, 121 bp, Homo sapiens
ttcaatttcttaacctatctcaaagatggagatcagtgtgagtccaatccatgtttaaatggcggcagttgcaaggatgacattaattcctatgaatgttggtgtccctttggatttgaag

SEQ ID NO: 2545 - DNA, 121 bp, Homo sapiens
cttcaaatccaaagggacaccaacattcataggaattaatgtcatccttgcaactgccgccatttaaacatggattggactcacactgatctccatctttgagataggttaagaaattgaa

SEQ ID NO: 2546 - DNA, 17 bp, Homo sapiens
gtttaaatggcggcagt

SEQ ID NO: 2547 - DNA, 17 bp, Homo sapiens
actgccgccatttaaac

SEQ ID NO: 2548 - DNA, 121 bp, Homo sapiens
aatttcttaacctatctcaaagatggagatcagtgtgagtccaatccatgtttaaatggcggcagttgcaaggatgacattaattcctatgaatgttggtgtccctttggatttgaaggaa

SEQ ID NO: 2549 - DNA, 121 bp, Homo sapiens
ttccttcaaatccaaagggacaccaacattcataggaattaatgtcatccttgcaactgccgccatttaaacatggattggactcacactgatctccatctttgagataggttaagaaatt

SEQ ID NO: 2550 - DNA, 17 bp, Homo sapiens
taaatggcggcagttgc

SEQ ID NO: 2551 - DNA, 17 bp, Homo sapiens
gcaactgccgccattta

SEQ ID NO: 2552 - DNA, 121 bp, Homo sapiens; identical to SEQ ID NO: 2548

SEQ ID NO: 2553 - DNA, 121 bp, Homo sapiens; identical to SEQ ID NO: 2549

SEQ ID NO: 2554 - DNA, 17 bp, Homo sapiens
taaatggcggcagttgc

SEQ ID NO: 2555 - DNA, 17 bp, Homo sapiens
gcaactgccgccattta

SEQ ID NO: 2556 - DNA, 121 bp, Homo sapiens
atttcttaacctatctcaaagatggagatcagtgtgagtccaatccatgtttaaatggcggcagttgcaaggatgacattaattcctatgaatgttggtgtccctttggatttgaaggaaa

SEQ ID NO: 2557 - DNA, 121 bp, Homo sapiens
tttccttcaaatccaaagggacaccaacattcataggaattaatgtcatccttgcaactgccgccatttaaacatggattggactcacactgatctccatctttgagataggttaagaaat

SEQ ID NO: 2558 - DNA, 17 bp, Homo sapiens
aaatggcggcagttgca

SEQ ID NO: 2559 - DNA, 17 bp, Homo sapiens
tgcaactgccgccattt

SEQ ID NO: 2560 - DNA, 121 bp, Homo sapiens; identical to SEQ ID NO: 2548

SEQ ID NO: 2561 - DNA, 121 bp, Homo sapiens; identical to SEQ ID NO: 2549

SEQ ID NO: 2562 - DNA, 17 bp, Homo sapiens
taaatggcggcagttgc

SEQ ID NO: 2563 - DNA, 17 bp, Homo sapiens
gcaactgccgccattta

SEQ ID NO: 2564 - DNA, 121 bp, Homo sapiens
taacctatctcaaagatggagatcagtgtgagtccaatccatgtttaaatggcggcagttgcaaggatgacattaattcctatgaatgttggtgtccctttggatttgaaggaaagaactg

SEQ ID NO: 2565 - DNA, 121 bp, Homo sapiens
cagttctttccttcaaatccaaagggacaccaacattcataggaattaatgtcatccttgcaactgccgccatttaaacatggattggactcacactgatctccatctttgagataggtta

SEQ ID NO: 2566 - DNA, 17 bp, Homo sapiens
cggcagttgcaaggatg

SEQ ID NO: 2567 - DNA, 17 bp, Homo sapiens
catccttgcaactgccg

SEQ ID NO: 2568 - DNA, 121 bp, Homo sapiens; identical to SEQ ID NO: 2564

SEQ ID NO: 2569 - DNA, 121 bp, Homo sapiens; identical to SEQ ID NO: 2565

SEQ ID NO: 2570 - DNA, 17 bp, Homo sapiens
cggcagttgcaaggatg

SEQ ID NO: 2571 - DNA, 17 bp, Homo sapiens
catccttgcaactgccg

SEQ ID NO: 2572 - DNA, 121 bp, Homo sapiens
aacctatctcaaagatggagatcagtgtgagtccaatccatgtttaaatggcggcagttgcaaggatgacattaattcctatgaatgttggtgtccctttggatttgaaggaaagaactgt

SEQ ID NO: 2573 - DNA, 121 bp, Homo sapiens
acagttctttccttcaaatccaaagggacaccaacattcataggaattaatgtcatccttgcaactgccgccatttaaacatggattggactcacactgatctccatctttgagataggtt

SEQ ID NO: 2574 - DNA, 17 bp, Homo sapiens
ggcagttgcaaggatga

SEQ ID NO: 2575 - DNA, 17 bp, Homo sapiens
tcatccttgcaactgcc

SEQ ID NO: 2576 - DNA, 121 bp, Homo sapiens
tctcaaagatggagatcagtgtgagtccaatccatgtttaaatggcggcagttgcaaggatgacattaattcctatgaatgttggtgtccctttggatttgaaggaaagaactgtgaatta

SEQ ID NO: 2577 - DNA, 121 bp, Homo sapiens
taattcacagttctttccttcaaatccaaagggacaccaacattcataggaattaatgtcatccttgcaactgccgccatttaaacatggattggactcacactgatctccatctttgaga

SEQ ID NO: 2578 - DNA, 17 bp, Homo sapiens
tgcaaggatgacattaa

SEQ ID NO: 2579 - DNA, 17 bp, Homo sapiens
ttaatgtcatccttgca

SEQ ID NO: 2580 - DNA, 121 bp, Homo sapiens
atctcaaagatggagatcagtgtgagtccaatccatgtttaaatggcggcagttgcaaggatgacattaattcctatgaatgttggtgtccctttggatttgaaggaaagaactgtgaatt

SEQ ID NO: 2581 - DNA, 121 bp, Homo sapiens
aattcacagttctttccttcaaatccaaagggacaccaacattcataggaattaatgtcatccttgcaactgccgccatttaaacatggattggactcacactgatctccatctttgagat

SEQ ID NO: 2582 - DNA, 17 bp, Homo sapiens
ttgcaaggatgacatta

SEQ ID NO: 2583 - DNA, 17 bp, Homo sapiens
taatgtcatccttgcaa

SEQ ID NO: 2584 - DNA, 121 bp, Homo sapiens
tatctcaaagatggagatcagtgtgagtccaatccatgtttaaatggcggcagttgcaaggatgacattaattcctatgaatgttggtgtccctttggatttgaaggaaagaactgtgaat

SEQ ID NO: 2585 - DNA, 121 bp, Homo sapiens
attcacagttctttccttcaaatccaaagggacaccaacattcataggaattaatgtcatccttgcaactgccgccatttaaacatggattggactcacactgatctccatctttgagata

SEQ ID NO: 2586 - DNA, 17 bp, Homo sapiens
gttgcaaggatgacatt

SEQ ID NO: 2587 - DNA, 17 bp, Homo sapiens
aatgtcatccttgcaac

SEQ ID NO: 2588 - DNA, 121 bp, Homo sapiens
aagatggagatcagtgtgagtccaatccatgtttaaatggcggcagttgcaaggatgacattaattcctatgaatgttggtgtccctttggatttgaaggaaagaactgtgaattaggtaa

SEQ ID NO: 2589 - DNA, 121 bp, Homo sapiens
ttacctaattcacagttctttccttcaaatccaaagggacaccaacattcataggaattaatgtcatccttgcaactgccgccatttaaacatggattggactcacactgatctccatctt

SEQ ID NO: 2590 - DNA, 17 bp, Homo sapiens
ggatgacattaattcct

SEQ ID NO: 2591 - DNA, 17 bp, Homo sapiens
aggaattaatgtcatcc

SEQ ID NO: 2592 - DNA, 121 bp, Homo sapiens; identical to SEQ ID NO: 2588

SEQ ID NO: 2593 - DNA, 121 bp, Homo sapiens; identical to SEQ ID NO: 2589

SEQ ID NO: 2594 - DNA, 17 bp, Homo sapiens
ggatgacattaattcct

SEQ ID NO: 2595 - DNA, 17 bp, Homo sapiens
aggaattaatgtcatcc

SEQ ID NO: 2596 - DNA, 121 bp, Homo sapiens
tggagatcagtgtgagtccaatccatgtttaaatggcggcagttgcaaggatgacattaattcctatgaatgttggtgtccctttggatttgaaggaaagaactgtgaattaggtaagtaa

SEQ ID NO: 2597 - DNA, 121 bp, Homo sapiens
ttacttacctaattcacagttctttccttcaaatccaaagggacaccaacattcataggaattaatgtcatccttgcaactgccgccatttaaacatggattggactcacactgatctcca

SEQ ID NO: 2598 - DNA, 17 bp, Homo sapiens
gacattaattcctatga

SEQ ID NO: 2599 - DNA, 17 bp, Homo sapiens
tcataggaattaatgtc

SEQ ID NO: 2600 - DNA, 121 bp, Homo sapiens
atcagtgtgagtccaatccatgtttaaatggcggcagttgcaaggatgacattaattcctatgaatgttggtgtccctttggatttgaaggaaagaactgtgaattaggtaagtaactatt

SEQ ID NO: 2601 - DNA, 121 bp, Homo sapiens
aatagttacttacctaattcacagttctttccttcaaatccaaagggacaccaacattcataggaattaatgtcatccttgcaactgccgccatttaaacatggattggactcacactgat

SEQ ID NO: 2602 - DNA, 17 bp, Homo sapiens
taattcctatgaatgtt

SEQ ID NO: 2603 - DNA, 17 bp, Homo sapiens
aacattcataggaatta

SEQ ID NO: 2604 - DNA, 121 bp, Homo sapiens
tgagtccaatccatgtttaaatggcggcagttgcaaggatgacattaattcctatgaatgttggtgtccctttggatttgaaggaaagaactgtgaattaggtaagtaactattttttgaa

SEQ ID NO: 2605 - DNA, 121 bp, Homo sapiens
ttcaaaaaatagttacttacctaattcacagttctttccttcaaatccaaagggacaccaacattcataggaattaatgtcatccttgcaactgccgccatttaaacatggattggactca

SEQ ID NO: 2606 - DNA, 17 bp, Homo sapiens
tatgaatgttggtgtcc

SEQ ID NO: 2607 - DNA, 17 bp, Homo sapiens
ggacaccaacattcata

SEQ ID NO: 2608 - DNA, 121 bp, Homo sapiens
gtgagtccaatccatgtttaaatggcggcagttgcaaggatgacattaattcctatgaatgttggtgtccctttggatttgaaggaaagaactgtgaattaggtaagtaactattttttga

SEQ ID NO: 2609 - DNA, 121 bp, Homo sapiens
tcaaaaaatagttacttacctaattcacagttctttccttcaaatccaaagggacaccaacattcataggaattaatgtcatccttgcaactgccgccatttaaacatggattggactcac

SEQ ID NO: 2610 - DNA, 17 bp, Homo sapiens
ctatgaatgttggtgtc

SEQ ID NO: 2611 - DNA, 17 bp, Homo sapiens
gacaccaacattcatag

SEQ ID NO: 2612 - DNA, 121 bp, Homo sapiens; identical to SEQ ID NO: 2608

SEQ ID NO: 2613 - DNA, 121 bp, Homo sapiens; identical to SEQ ID NO: 2609

SEQ ID NO: 2614 - DNA, 17 bp, Homo sapiens
ctatgaatgttggtgtc

SEQ ID NO: 2615 - DNA, 17 bp, Homo sapiens
gacaccaacattcatag

SEQ ID NO: 2616 - DNA, 121 bp, Homo sapiens
tgtgagtccaatccatgtttaaatggcggcagttgcaaggatgacattaattcctatgaatgttggtgtccctttggatttgaaggaaagaactgtgaattaggtaagtaactattttttg

SEQ ID NO: 2617 - DNA, 121 bp, Homo sapiens
caaaaaatagttacttacctaattcacagttctttccttcaaatccaaagggacaccaacattcataggaattaatgtcatccttgcaactgccgccatttaaacatggattggactcaca

SEQ ID NO: 2618 - DNA, 17 bp, Homo sapiens
cctatgaatgttggtgt

SEQ ID NO: 2619 - DNA, 17 bp, Homo sapiens
acaccaacattcatagg

SEQ ID NO: 2620 - DNA, 121 bp, Homo sapiens
gagtccaatccatgtttaaatggcggcagttgcaaggatgacattaattcctatgaatgttggtgtccctttggatttgaaggaaagaactgtgaattaggtaagtaactattttttgaat

SEQ ID NO: 2621 - DNA, 121 bp, Homo sapiens
attcaaaaaatagttacttacctaattcacagttctttccttcaaatccaaagggacaccaacattcataggaattaatgtcatccttgcaactgccgccatttaaacatggattggactc

SEQ ID NO: 2622 - DNA, 17 bp, Homo sapiens
atgaatgttggtgtccc

SEQ ID NO: 2623 - DNA, 17 bp, Homo sapiens
gggacaccaacattcat

SEQ ID NO: 2624 - DNA, 121 bp, Homo sapiens
gtccaatccatgtttaaatggcggcagttgcaaggatgacattaattcctatgaatgttggtgtccctttggatttgaaggaaagaactgtgaattaggtaagtaactattttttgaatac

SEQ ID NO: 2625 - DNA, 121 bp, Homo sapiens
gtattcaaaaaatagttacttacctaattcacagttctttccttcaaatccaaagggacaccaacattcataggaattaatgtcatccttgcaactgccgccatttaaacatggattggac

SEQ ID NO: 2626 - DNA, 17 bp, Homo sapiens
gaatgttggtgtccctt

SEQ ID NO: 2627 - DNA, 17 bp, Homo sapiens
aagggacaccaacattc

SEQ ID NO: 2628 - DNA, 121 bp, Homo sapiens
ccaatccatgtttaaatggcggcagttgcaaggatgacattaattcctatgaatgttggtgtccctttggatttgaaggaaagaactgtgaattaggtaagtaactattttttgaatactc

SEQ ID NO: 2629 - DNA, 121 bp, Homo sapiens
gagtattcaaaaaatagttacttacctaattcacagttctttccttcaaatccaaagggacaccaacattcataggaattaatgtcatccttgcaactgccgccatttaaacatggattgg

SEQ ID NO: 2630 - DNA, 17 bp, Homo sapiens
atgttggtgtccctttg

SEQ ID NO: 2631 - DNA, 17 bp, Homo sapiens
caaagggacaccaacat

SEQ ID NO: 2632 - DNA, 121 bp, Homo sapiens
tccaatccatgtttaaatggcggcagttgcaaggatgacattaattcctatgaatgttggtgtccctttggatttgaaggaaagaactgtgaattaggtaagtaactattttttgaatact

SEQ ID NO: 2633 - DNA, 121 bp, Homo sapiens
agtattcaaaaaatagttacttacctaattcacagttctttccttcaaatccaaagggacaccaacattcataggaattaatgtcatccttgcaactgccgccatttaaacatggattgga

SEQ ID NO: 2634 - DNA, 17 bp, Homo sapiens
aatgttggtgtcccttt

SEQ ID NO: 2635 - DNA, 17 bp, Homo sapiens
aaagggacaccaacatt

SEQ ID NO: 2636 - DNA, 121 bp, Homo sapiens; identical to SEQ ID NO: 2628

SEQ ID NO: 2637 - DNA, 121 bp, Homo sapiens; identical to SEQ ID NO: 2629

SEQ ID NO: 2638 - DNA, 17 bp, Homo sapiens
atgttggtgtccctttg

SEQ ID NO: 2639 - DNA, 17 bp, Homo sapiens
caaagggacaccaacat

SEQ ID NO: 2640 - DNA, 121 bp, Homo sapiens
caatccatgtttaaatggcggcagttgcaaggatgacattaattcctatgaatgttggtgtccctttggatttgaaggaaagaactgtgaattaggtaagtaactattttttgaatactca

SEQ ID NO: 2641 - DNA, 121 bp, Homo sapiens
tgagtattcaaaaaatagttacttacctaattcacagttctttccttcaaatccaaagggacaccaacattcataggaattaatgtcatccttgcaactgccgccatttaaacatggattg

SEQ ID NO: 2642 - DNA, 17 bp, Homo sapiens
tgttggtgtccctttgg

SEQ ID NO: 2643 - DNA, 17 bp, Homo sapiens
ccaaagggacaccaaca

SEQ ID NO: 2644 - DNA, 121 bp, Homo sapiens
gtttaaatggcggcagttgcaaggatgacattaattcctatgaatgttggtgtccctttggatttgaaggaaagaactgtgaattaggtaagtaactattttttgaatactcatggttcaa

SEQ ID NO: 2645 - DNA, 121 bp, Homo sapiens
ttgaaccatgagtattcaaaaaatagttacttacctaattcacagttctttccttcaaatccaaagggacaccaacattcataggaattaatgtcatccttgcaactgccgccatttaaac

SEQ ID NO: 2646 - DNA, 17 bp, Homo sapiens
tccctttggatttgaag

SEQ ID NO: 2647 - DNA, 17 bp, Homo sapiens
cttcaaatccaaaggga

SEQ ID NO: 2648 - DNA, 121 bp, Homo sapiens
tgtttaaatggcggcagttgcaaggatgacattaattcctatgaatgttggtgtccctttggatttgaaggaaagaactgtgaattaggtaagtaactattttttgaatactcatggttca

SEQ ID NO: 2649 - DNA, 121 bp, Homo sapiens
tgaaccatgagtattcaaaaaatagttacttacctaattcacagttctttccttcaaatccaaagggacaccaacattcataggaattaatgtcatccttgcaactgccgccatttaaaca

SEQ ID NO: 2650 - DNA, 17 bp, Homo sapiens
gtccctttggatttgaa

SEQ ID NO: 2651 - DNA, 17 bp, Homo sapiens
ttcaaatccaaagggac

SEQ ID NO: 2652 - DNA, 121 bp, Homo sapiens
taaatggcggcagttgcaaggatgacattaattcctatgaatgttggtgtccctttggatttgaaggaaagaactgtgaattaggtaagtaactattttttgaatactcatggttcaaagt

SEQ ID NO: 2653 - DNA, 121 bp, Homo sapiens
actttgaaccatgagtattcaaaaaatagttacttacctaattcacagttctttccttcaaatccaaagggacaccaacattcataggaattaatgtcatccttgcaactgccgccattta

SEQ ID NO: 2654 - DNA, 17 bp, Homo sapiens
ctttggatttgaaggaa

SEQ ID NO: 2655 - DNA, 17 bp, Homo sapiens
ttccttcaaatccaaag

SEQ ID NO: 2656 - DNA, 121 bp, Homo sapiens; identical to SEQ ID NO: 2652

SEQ ID NO: 2657 - DNA, 121 bp, Homo sapiens; identical to SEQ ID NO: 2653

SEQ ID NO: 2658 - DNA, 17 bp, Homo sapiens
ctttggatttgaaggaa

SEQ ID NO: 2659 - DNA, 17 bp, Homo sapiens
ttccttcaaatccaaag

SEQ ID NO: 2660 - DNA, 121 bp, Homo sapiens; identical to SEQ ID NO: 2652

SEQ ID NO: 2661 - DNA, 121 bp, Homo sapiens; identical to SEQ ID NO: 2653

SEQ ID NO: 2662 - DNA, 17 bp, Homo sapiens
ctttggatttgaaggaa

SEQ ID NO: 2663 - DNA, 17 bp, Homo sapiens
ttccttcaaatccaaag

SEQ ID NO: 2664 - DNA, 121 bp, Homo sapiens
aatggcggcagttgcaaggatgacattaattcctatgaatgttggtgtccctttggatttgaaggaaagaactgtgaattaggtaagtaactattttttgaatactcatggttcaaagttt

SEQ ID NO: 2665 - DNA, 121 bp, Homo sapiens
aaactttgaaccatgagtattcaaaaaatagttacttacctaattcacagttctttccttcaaatccaaagggacaccaacattcataggaattaatgtcatccttgcaactgccgccatt

SEQ ID NO: 2666 - DNA, 17 bp, Homo sapiens
ttggatttgaaggaaag

SEQ ID NO: 2667 - DNA, 17 bp, Homo sapiens
ctttccttcaaatccaa

SEQ ID NO: 2668 - DNA, 121 bp, Homo sapiens
gcggcagttgcaaggatgacattaattcctatgaatgttggtgtccctttggatttgaaggaaagaactgtgaattaggtaagtaactattttttgaatactcatggttcaaagtttccct

SEQ ID NO: 2669 - DNA, 121 bp, Homo sapiens
agggaaactttgaaccatgagtattcaaaaaatagttacttacctaattcacagttctttccttcaaatccaaagggacaccaacattcataggaattaatgtcatccttgcaactgccgc

SEQ ID NO: 2670 - DNA, 17 bp, Homo sapiens
atttgaaggaaagaact

SEQ ID NO: 2671 - DNA, 17 bp, Homo sapiens
agttctttccttcaaat

SEQ ID NO: 2672 - DNA, 121 bp, Homo sapiens
ggcggcagttgcaaggatgacattaattcctatgaatgttggtgtccctttggatttgaaggaaagaactgtgaattaggtaagtaactattttttgaatactcatggttcaaagtttccc

SEQ ID NO: 2673 - DNA, 121 bp, Homo sapiens
gggaaactttgaaccatgagtattcaaaaaatagttacttacctaattcacagttctttccttcaaatccaaagggacaccaacattcataggaattaatgtcatccttgcaactgccgcc

SEQ ID NO: 2674 - DNA, 17 bp, Homo sapiens
gatttgaaggaaagaac

SEQ ID NO: 2675 - DNA, 17 bp, Homo sapiens
gttctttccttcaaatc

SEQ ID NO: 2676 - DNA, 121 bp, Homo sapiens; identical to SEQ ID NO: 2668

SEQ ID NO: 2677 - DNA, 121 bp, Homo sapiens; identical to SEQ ID NO: 2669

SEQ ID NO: 2678 - DNA, 17 bp, Homo sapiens
atttgaaggaaagaact

SEQ ID NO: 2679 - DNA, 17 bp, Homo sapiens
agttctttccttcaaat

SEQ ID NO: 2680 - DNA, 121 bp, Homo sapiens
ttagaaatgcatgttaaatgatgctgttactgtctattttgcttcttttagatgtaacatgtaacattaagaatggcagatgcgagcagttttgtaaaaatagtgctgataacaaggtggt

SEQ ID NO: 2681 - DNA, 121 bp, Homo sapiens
accaccttgttatcagcactatttttacaaaactgctcgcatctgccattcttaatgttacatgttacatctaaaagaagcaaaatagacagtaacagcatcatttaacatgcatttctaa

SEQ ID NO: 2682 - DNA, 17 bp, Homo sapiens
tgtaacatgtaacatta

SEQ ID NO: 2683 - DNA, 17 bp, Homo sapiens
taatgttacatgttaca

SEQ ID NO: 2684 - DNA, 121 bp, Homo sapiens; identical to SEQ ID NO: 2680

SEQ ID NO: 2685 - DNA, 121 bp, Homo sapiens; identical to SEQ ID NO: 2681

SEQ ID NO: 2686 - DNA, 17 bp, Homo sapiens
tgtaacatgtaacatta

SEQ ID NO: 2687 - DNA, 17 bp, Homo sapiens
taatgttacatgttaca

SEQ ID NO: 2688 - DNA, 121 bp, Homo sapiens
tttagaaatgcatgttaaatgatgctgttactgtctattttgcttcttttagatgtaacatgtaacattaagaatggcagatgcgagcagttttgtaaaaatagtgctgataacaaggtgg

SEQ ID NO: 2689 - DNA, 121 bp, Homo sapiens
ccaccttgttatcagcactatttttacaaaactgctcgcatctgccattcttaatgttacatgttacatctaaaagaagcaaaatagacagtaacagcatcatttaacatgcatttctaaa

SEQ ID NO: 2690 - DNA, 17 bp, Homo sapiens
atgtaacatgtaacatt

SEQ ID NO: 2691 - DNA, 17 bp, Homo sapiens
aatgttacatgttacat

SEQ ID NO: 2692 - DNA, 121 bp, Homo sapiens; identical to SEQ ID NO: 2680

SEQ ID NO: 2693 - DNA, 121 bp, Homo sapiens; identical to SEQ ID NO: 2681

SEQ ID NO: 2694 - DNA, 17 bp, Homo sapiens
tgtaacatgtaacatta

SEQ ID NO: 2695 - DNA, 17 bp, Homo sapiens
taatgttacatgttaca

SEQ ID NO: 2696 - DNA, 121 bp, Homo sapiens
atgcatgttaaatgatgctgttactgtctattttgcttcttttagatgtaacatgtaacattaagaatggcagatgcgagcagttttgtaaaaatagtgctgataacaaggtggtttgctc

SEQ ID NO: 2697 - DNA, 121 bp, Homo sapiens
gagcaaaccaccttgttatcagcactatttttacaaaactgctcgcatctgccattcttaatgttacatgttacatctaaaagaagcaaaatagacagtaacagcatcatttaacatgcat

SEQ ID NO: 2698 - DNA, 17 bp, Homo sapiens
atgtaacattaagaatg

SEQ ID NO: 2699 - DNA, 17 bp, Homo sapiens
cattcttaatgttacat

SEQ ID NO: 2700 - DNA, 121 bp, Homo sapiens
tgttaaatgatgctgttactgtctattttgcttcttttagatgtaacatgtaacattaagaatggcagatgcgagcagttttgtaaaaatagtgctgataacaaggtggtttgctcctgta

SEQ ID NO: 2701 - DNA, 121 bp, Homo sapiens
tacaggagcaaaccaccttgttatcagcactatttttacaaaactgctcgcatctgccattcttaatgttacatgttacatctaaaagaagcaaaatagacagtaacagcatcatttaaca

SEQ ID NO: 2702 - DNA, 17 bp, Homo sapiens
acattaagaatggcaga

SEQ ID NO: 2703 - DNA, 17 bp, Homo sapiens
tctgccattcttaatgt

SEQ ID NO: 2704 - DNA, 121 bp, Homo sapiens
ttaaatgatgctgttactgtctattttgcttcttttagatgtaacatgtaacattaagaatggcagatgcgagcagttttgtaaaaatagtgctgataacaaggtggtttgctcctgtact

SEQ ID NO: 2705 - DNA, 121 bp, Homo sapiens
agtacaggagcaaaccaccttgttatcagcactatttttacaaaactgctcgcatctgccattcttaatgttacatgttacatctaaaagaagcaaaatagacagtaacagcatcatttaa

SEQ ID NO: 2706 - DNA, 17 bp, Homo sapiens
attaagaatggcagatg

SEQ ID NO: 2707 - DNA, 17 bp, Homo sapiens
catctgccattcttaat

SEQ ID NO: 2708 - DNA, 121 bp, Homo sapiens
aaatgatgctgttactgtctattttgcttcttttagatgtaacatgtaacattaagaatggcagatgcgagcagttttgtaaaaatagtgctgataacaaggtggtttgctcctgtactga

SEQ ID NO: 2709 - DNA, 121 bp, Homo sapiens
tcagtacaggagcaaaccaccttgttatcagcactatttttacaaaactgctcgcatctgccattcttaatgttacatgttacatctaaaagaagcaaaatagacagtaacagcatcattt

SEQ ID NO: 2710 - DNA, 17 bp, Homo sapiens
taagaatggcagatgcg

SEQ ID NO: 2711 - DNA, 17 bp, Homo sapiens
cgcatctgccattctta

SEQ ID NO: 2712 - DNA, 121 bp, Homo sapiens
taaatgatgctgttactgtctattttgcttcttttagatgtaacatgtaacattaagaatggcagatgcgagcagttttgtaaaaatagtgctgataacaaggtggtttgctcctgtactg

SEQ ID NO: 2713 - DNA, 121 bp, Homo sapiens
cagtacaggagcaaaccaccttgttatcagcactatttttacaaaactgctcgcatctgccattcttaatgttacatgttacatctaaaagaagcaaaatagacagtaacagcatcattta

SEQ ID NO: 2714 - DNA, 17 bp, Homo sapiens
ttaagaatggcagatgc

SEQ ID NO: 2715 - DNA, 17 bp, Homo sapiens
gcatctgccattcttaa

SEQ ID NO: 2716 - DNA, 121 bp, Homo sapiens
gatgctgttactgtctattttgcttcttttagatgtaacatgtaacattaagaatggcagatgcgagcagttttgtaaaaatagtgctgataacaaggtggtttgctcctgtactgaggga

SEQ ID NO: 2717 - DNA, 121 bp, Homo sapiens
tccctcagtacaggagcaaaccaccttgttatcagcactatttttacaaaactgctcgcatctgccattcttaatgttacatgttacatctaaaagaagcaaaatagacagtaacagcatc

SEQ ID NO: 2718 - DNA, 17 bp, Homo sapiens
aatggcagatgcgagca

SEQ ID NO: 2719 - DNA, 17 bp, Homo sapiens
tgctcgcatctgccatt

SEQ ID NO: 2720 - DNA, 121 bp, Homo sapiens
tgctgttactgtctattttgcttcttttagatgtaacatgtaacattaagaatggcagatgcgagcagttttgtaaaaatagtgctgataacaaggtggtttgctcctgtactgagggata

SEQ ID NO: 2721 - DNA, 121 bp, Homo sapiens
tatccctcagtacaggagcaaaccaccttgttatcagcactatttttacaaaactgctcgcatctgccattcttaatgttacatgttacatctaaaagaagcaaaatagacagtaacagca

SEQ ID NO: 2722 - DNA, 17 bp, Homo sapiens
tggcagatgcgagcagt

SEQ ID NO: 2723 - DNA, 17 bp, Homo sapiens
actgctcgcatctgcca

SEQ ID NO: 2724 - DNA, 121 bp, Homo sapiens
gctgttactgtctattttgcttcttttagatgtaacatgtaacattaagaatggcagatgcgagcagttttgtaaaaatagtgctgataacaaggtggtttgctcctgtactgagggatat

SEQ ID NO: 2725 - DNA, 121 bp, Homo sapiens
atatccctcagtacaggagcaaaccaccttgttatcagcactatttttacaaaactgctcgcatctgccattcttaatgttacatgttacatctaaaagaagcaaaatagacagtaacagc

SEQ ID NO: 2726 - DNA, 17 bp, Homo sapiens
ggcagatgcgagcagtt

SEQ ID NO: 2727 - DNA, 17 bp, Homo sapiens
aactgctcgcatctgcc

SEQ ID NO: 2728 - DNA, 121 bp, Homo sapiens; identical to SEQ ID NO: 2724

SEQ ID NO: 2729 - DNA, 121 bp, Homo sapiens; identical to SEQ ID NO: 2725

SEQ ID NO: 2730 - DNA, 17 bp, Homo sapiens
ggcagatgcgagcagtt

SEQ ID NO: 2731 - DNA, 17 bp, Homo sapiens
aactgctcgcatctgcc

SEQ ID NO: 2732 - DNA, 121 bp, Homo sapiens
tactgtctattttgcttcttttagatgtaacatgtaacattaagaatggcagatgcgagcagttttgtaaaaatagtgctgataacaaggtggtttgctcctgtactgagggatatcgact

SEQ ID NO: 2733 - DNA, 121 bp, Homo sapiens
agtcgatatccctcagtacaggagcaaaccaccttgttatcagcactatttttacaaaactgctcgcatctgccattcttaatgttacatgttacatctaaaagaagcaaaatagacagta

SEQ ID NO: 2734 - DNA, 17 bp, Homo sapiens
atgcgagcagttttgta

SEQ ID NO: 2735 - DNA, 17 bp, Homo sapiens
tacaaaactgctcgcat

SEQ ID NO: 2736 - DNA, 121 bp, Homo sapiens
ttactgtctattttgcttcttttagatgtaacatgtaacattaagaatggcagatgcgagcagttttgtaaaaatagtgctgataacaaggtggtttgctcctgtactgagggatatcgac

SEQ ID NO: 2737 - DNA, 121 bp, Homo sapiens
gtcgatatccctcagtacaggagcaaaccaccttgttatcagcactatttttacaaaactgctcgcatctgccattcttaatgttacatgttacatctaaaagaagcaaaatagacagtaa

SEQ ID NO: 2738 - DNA, 17 bp, Homo sapiens
gatgcgagcagttttgt

SEQ ID NO: 2739 - DNA, 17 bp, Homo sapiens
acaaaactgctcgcatc

SEQ ID NO: 2740 - DNA, 121 bp, Homo sapiens
tctattttgcttcttttagatgtaacatgtaacattaagaatggcagatgcgagcagttttgtaaaaatagtgctgataacaaggtggtttgctcctgtactgagggatatcgacttgcag

SEQ ID NO: 2741 - DNA, 121 bp, Homo sapiens
ctgcaagtcgatatccctcagtacaggagcaaaccaccttgttatcagcactatttttacaaaactgctcgcatctgccattcttaatgttacatgttacatctaaaagaagcaaaataga

SEQ ID NO: 2742 - DNA, 17 bp, Homo sapiens
agcagttttgtaaaaat

SEQ ID NO: 2743 - DNA, 17 bp, Homo sapiens
atttttacaaaactgct

SEQ ID NO: 2744 - DNA, 121 bp, Homo sapiens
ctattttgcttcttttagatgtaacatgtaacattaagaatggcagatgcgagcagttttgtaaaaatagtgctgataacaaggtggtttgctcctgtactgagggatatcgacttgcaga

SEQ ID NO: 2745 - DNA, 121 bp, Homo sapiens
tctgcaagtcgatatccctcagtacaggagcaaaccaccttgttatcagcactatttttacaaaactgctcgcatctgccattcttaatgttacatgttacatctaaaagaagcaaaatag

SEQ ID NO: 2746 - DNA, 17 bp, Homo sapiens
gcagttttgtaaaaata

SEQ ID NO: 2747 - DNA, 17 bp, Homo sapiens
tatttttacaaaactgc

SEQ ID NO: 2748 - DNA, 121 bp, Homo sapiens
ttttttgctaaaactaaagaattattcttttacatttcagtttttcttgatcatgaaaacgccaacaaaattctgaatcggccaaagaggtataattcaggtaaattggaagagtttgttc

SEQ ID NO: 2749 - DNA, 121 bp, Homo sapiens
gaacaaactcttccaatttacctgaattatacctctttggccgattcagaattttgttggcgttttcatgatcaagaaaaactgaaatgtaaaagaataattctttagttttagcaaaaaa

SEQ ID NO: 2750 - DNA, 17 bp, Homo sapiens
atgaaaacgccaacaaa

SEQ ID NO: 2751 - DNA, 17 bp, Homo sapiens
tttgttggcgttttcat

SEQ ID NO: 2752 - DNA, 121 bp, Homo sapiens
tttttgctaaaactaaagaattattcttttacatttcagtttttcttgatcatgaaaacgccaacaaaattctgaatcggccaaagaggtataattcaggtaaattggaagagtttgttca

SEQ ID NO: 2753 - DNA, 121 bp, Homo sapiens
tgaacaaactcttccaatttacctgaattatacctctttggccgattcagaattttgttggcgttttcatgatcaagaaaaactgaaatgtaaaagaataattctttagttttagcaaaaa

SEQ ID NO: 2754 - DNA, 17 bp, Homo sapiens
tgaaaacgccaacaaaa

SEQ ID NO: 2755 - DNA, 17 bp, Homo sapiens
ttttgttggcgttttca

SEQ ID NO: 2756 - DNA, 121 bp, Homo sapiens
tgcagcgcgtgaacatgatcatggcagaatcaccaggcctcatcaccatctgccttttaggatatctactcagtgctgaatgtacaggtttgtttccttttttaaaatacattgagtatgc

SEQ ID NO: 2757 - DNA, 121 bp, Homo sapiens
gcatactcaatgtattttaaaaaaggaaacaaacctgtacattcagcactgagtagatatcctaaaaggcagatggtgatgaggcctggtgattctgccatgatcatgttcacgcgctgca

SEQ ID NO: 2758 - DNA, 17 bp, Homo sapiens
ccttttaggatatctac

SEQ ID NO: 2759 - DNA, 17 bp, Homo sapiens
gtagatatcctaaaagg

SEQ ID NO: 2760 - DNA, 121 bp, Homo sapiens
ttatgcagcgcgtgaacatgatcatggcagaatcaccaggcctcatcaccatctgccttttaggatatctactcagtgctgaatgtacaggtttgtttccttttttaaaatacattgagta

SEQ ID NO: 2761 - DNA, 121 bp, Homo sapiens
tactcaatgtattttaaaaaaggaaacaaacctgtacattcagcactgagtagatatcctaaaaggcagatggtgatgaggcctggtgattctgccatgatcatgttcacgcgctgcataa

SEQ ID NO: 2762 - DNA, 17 bp, Homo sapiens
ctgccttttaggatatc

SEQ ID NO: 2763 - DNA, 17 bp, Homo sapiens
gatatcctaaaaggcag

SEQ ID NO: 2764 - DNA, 121 bp, Homo sapiens
tagcaaaggttatgcagcgcgtgaacatgatcatggcagaatcaccaggcctcatcaccatctgccttttaggatatctactcagtgctgaatgtacaggtttgtttccttttttaaaata

SEQ ID NO: 2765 - DNA, 121 bp, Homo sapiens
tattttaaaaaaggaaacaaacctgtacattcagcactgagtagatatcctaaaaggcagatggtgatgaggcctggtgattctgccatgatcatgttcacgcgctgcataacctttgcta

SEQ ID NO: 2766 - DNA, 17 bp, Homo sapiens
catcaccatctgccttt

SEQ ID NO: 2767 - DNA, 17 bp, Homo sapiens
aaaggcagatggtgatg

SEQ ID NO: 2768 - DNA, 121 bp, Homo sapiens
actaatcgaccttaccactttcacaatctgctagcaaaggttatgcagcgcgtgaacatgatcatggcagaatcaccaggcctcatcaccatctgccttttaggatatctactcagtgctg

SEQ ID NO: 2769 - DNA, 121 bp, Homo sapiens
cagcactgagtagatatcctaaaaggcagatggtgatgaggcctggtgattctgccatgatcatgttcacgcgctgcataacctttgctagcagattgtgaaagtggtaaggtcgattagt

SEQ ID NO: 2770 - DNA, 17 bp, Homo sapiens
tgaacatgatcatggca

SEQ ID NO: 2771 - DNA, 17 bp, Homo sapiens
tgccatgatcatgttca

SEQ ID NO: 2772 - DNA, 121 bp, Homo sapiens
actttggtacaactaatcgaccttaccactttcacaatctgctagcaaaggttatgcagcgcgtgaacatgatcatggcagaatcaccaggcctcatcaccatctgccttttaggatatct

SEQ ID NO: 2773 - DNA, 121 bp, Homo sapiens
agatatcctaaaaggcagatggtgatgaggcctggtgattctgccatgatcatgttcacgcgctgcataacctttgctagcagattgtgaaagtggtaaggtcgattagttgtaccaaagt

SEQ ID NO: 2774 - DNA, 17 bp, Homo sapiens
tatgcagcgcgtgaaca

SEQ ID NO: 2775 - DNA, 17 bp, Homo sapiens
tgttcacgcgctgcata

SEQ ID NO: 2776 - DNA, 121 bp, Homo sapiens
ccctggcgcgctcgcggcccggcactcttctggtccccacagactcagagagaacccaccatggtgctgtctcctgccgacaagaccaacgtcaaggccgcctggggtaaggtcggcgcgc

SEQ ID NO: 2777 - DNA, 121 bp, Homo sapiens
gcgcgccgaccttaccccaggcggccttgacgttggtcttgtcggcaggagacagcaccatggtgggttctctctgagtctgtggggaccagaagagtgccgggccgcgagcgcgccaggg

SEQ ID NO: 2778 - DNA, 17 bp, Homo sapiens
aacccaccatggtgctg

SEQ ID NO: 2779 - DNA, 17 bp, Homo sapiens
cagcaccatggtgggtt

SEQ ID NO: 2780 - DNA, 121 bp, Homo sapiens
cacagactcagagagaacccaccatggtgctgtctcctgccgacaagaccaacgtcaaggccgcctggggtaaggtcggcgcgcacgctggcgagtatggtgcggaggccctggagaggtg

SEQ ID NO: 2781 - DNA, 121 bp, Homo sapiens
cacctctccagggcctccgcaccatactcgccagcgtgcgcgccgaccttaccccaggcggccttgacgttggtcttgtcggcaggagacagcaccatggtgggttctctctgagtctgtg

SEQ ID NO: 2782 - DNA, 17 bp, Homo sapiens
cgtcaaggccgcctggg

SEQ ID NO: 2783 - DNA, 17 bp, Homo sapiens
cccaggcggccttgacg

SEQ ID NO: 2784 - DNA, 121 bp, Homo sapiens
agagagaacccaccatggtgctgtctcctgccgacaagaccaacgtcaaggccgcctggggtaaggtcggcgcgcacgctggcgagtatggtgcggaggccctggagaggtgaggctccct

SEQ ID NO: 2785 - DNA, 121 bp, Homo sapiens
agggagcctcacctctccagggcctccgcaccatactcgccagcgtgcgcgccgaccttaccccaggcggccttgacgttggtcttgtcggcaggagacagcaccatggtgggttctctct

SEQ ID NO: 2786 - DNA, 17 bp, Homo sapiens
cgcctggggtaaggtcg

SEQ ID NO: 2787 - DNA, 17 bp, Homo sapiens
cgaccttaccccaggcg

SEQ ID NO: 2788 - DNA, 121 bp, Homo sapiens
ctgccgacaagaccaacgtcaaggccgcctggggtaaggtcggcgcgcacgctggcgagtatggtgcggaggccctggagaggtgaggctccctcccctgctccgacccgggctcctcgcc

SEQ ID NO: 2789 - DNA, 121 bp, Homo sapiens
ggcgaggagcccgggtcggagcaggggagggagcctcacctctccagggcctccgcaccatactcgccagcgtgcgcgccgaccttaccccaggcggccttgacgttggtcttgtcggcag

SEQ ID NO: 2790 - DNA, 17 bp, Homo sapiens
tggcgagtatggtgcgg

SEQ ID NO: 2791 - DNA, 17 bp, Homo sapiens
ccgcaccatactcgcca

SEQ ID NO: 2792 - DNA, 121 bp, Homo sapiens
gaccaacgtcaaggccgcctggggtaaggtcggcgcgcacgctggcgagtatggtgcggaggccctggagaggtgaggctccctcccctgctccgacccgggctcctcgcccgcccggacc

SEQ ID NO: 2793 - DNA, 121 bp, Homo sapiens
ggtccgggcgggcgaggagcccgggtcggagcaggggagggagcctcacctctccagggcctccgcaccatactcgccagcgtgcgcgccgaccttaccccaggcggccttgacgttggtc

SEQ ID NO: 2794 - DNA, 17 bp, Homo sapiens
ggtgcggaggccctgga

SEQ ID NO: 2795 - DNA, 17 bp, Homo sapiens
tccagggcctccgcacc

SEQ ID NO: 2796 - DNA, 121 bp, Homo sapiens
gagccacggctctgcccaggttaagggccacggcaagaaggtggccgacgcgctgaccaacgccgtggcgcacgtggacgacatgcccaacgcgctgtccgccctgagcgacctgcacgcg

SEQ ID NO: 2797 - DNA, 121 bp, Homo sapiens
cgcgtgcaggtcgctcagggcggacagcgcgttgggcatgtcgtccacgtgcgccacggcgttggtcagcgcgtcggccaccttcttgccgtggcccttaacctgggcagagccgtggctc

SEQ ID NO: 2798 - DNA, 17 bp, Homo sapiens
ctgaccaacgccgtggc

SEQ ID NO: 2799 - DNA, 17 bp, Homo sapiens
gccacggcgttggtcag

SEQ ID NO: 2800 - DNA, 121 bp, Homo sapiens
aggttaagggccacggcaagaaggtggccgacgcgctgaccaacgccgtggcgcacgtggacgacatgcccaacgcgctgtccgccctgagcgacctgcacgcgcacaagcttcgggtgga

SEQ ID NO: 2801 - DNA, 121 bp, Homo sapiens
tccacccgaagcttgtgcgcgtgcaggtcgctcagggcggacagcgcgttgggcatgtcgtccacgtgcgccacggcgttggtcagcgcgtcggccaccttcttgccgtggcccttaacct

SEQ ID NO: 2802 - DNA, 17 bp, Homo sapiens
gcacgtggacgacatgc

SEQ ID NO: 2803 - DNA, 17 bp, Homo sapiens
gcatgtcgtccacgtgc

SEQ ID NO: 2804 - DNA, 121 bp, Homo sapiens
caggttaagggccacggcaagaaggtggccgacgcgctgaccaacgccgtggcgcacgtggacgacatgcccaacgcgctgtccgccctgagcgacctgcacgcgcacaagcttcgggtgg

SEQ ID NO: 2805 - DNA, 121 bp, Homo sapiens
ccacccgaagcttgtgcgcgtgcaggtcgctcagggcggacagcgcgttgggcatgtcgtccacgtgcgccacggcgttggtcagcgcgtcggccaccttcttgccgtggcccttaacctg

SEQ ID NO: 2806 - DNA, 17 bp, Homo sapiens
cgcacgtggacgacatg

SEQ ID NO: 2807 - DNA, 17 bp, Homo sapiens
catgtcgtccacgtgcg

SEQ ID NO: 2808 - DNA, 121 bp, Homo sapiens
cacggcaagaaggtggccgacgcgctgaccaacgccgtggcgcacgtggacgacatgcccaacgcgctgtccgccctgagcgacctgcacgcgcacaagcttcgggtggacccggtcaact

SEQ ID NO: 2809 - DNA, 121 bp, Homo sapiens
agttgaccgggtccacccgaagcttgtgcgcgtgcaggtcgctcagggcggacagcgcgttgggcatgtcgtccacgtgcgccacggcgttggtcagcgcgtcggccaccttcttgccgtg

SEQ ID NO: 2810 - DNA, 17 bp, Homo sapiens
acatgcccaacgcgctg

SEQ ID NO: 2811 - DNA, 17 bp, Homo sapiens
cagcgcgttgggcatgt

SEQ ID NO: 2812 - DNA, 121 bp, Homo sapiens
accaacgccgtggcgcacgtggacgacatgcccaacgcgctgtccgccctgagcgacctgcacgcgcacaagcttcgggtggacccggtcaacttcaaggtgagcggcgggccgggagcga

SEQ ID NO: 2813 - DNA, 121 bp, Homo sapiens
tcgctcccggcccgccgctcaccttgaagttgaccgggtccacccgaagcttgtgcgcgtgcaggtcgctcagggcggacagcgcgttgggcatgtcgtccacgtgcgccacggcgttggt

SEQ ID NO: 2814 - DNA, 17 bp, Homo sapiens
gcgacctgcacgcgcac

SEQ ID NO: 2815 - DNA, 17 bp, Homo sapiens
gtgcgcgtgcaggtcgc

SEQ ID NO: 2816 - DNA, 121 bp, Homo sapiens
ggcgcacgtggacgacatgcccaacgcgctgtccgccctgagcgacctgcacgcgcacaagcttcgggtggacccggtcaacttcaaggtgagcggcgggccgggagcgatctgggtcgag

SEQ ID NO: 2817 - DNA, 121 bp, Homo sapiens
ctcgacccagatcgctcccggcccgccgctcaccttgaagttgaccgggtccacccgaagcttgtgcgcgtgcaggtcgctcagggcggacagcgcgttgggcatgtcgtccacgtgcgcc

SEQ ID NO: 2818 - DNA, 17 bp, Homo sapiens
gcgcacaagcttcgggt

SEQ ID NO: 2819 - DNA, 17 bp, Homo sapiens
acccgaagcttgtgcgc

SEQ ID NO: 2820 - DNA, 121 bp, Homo sapiens
tggcgcacgtggacgacatgcccaacgcgctgtccgccctgagcgacctgcacgcgcacaagcttcgggtggacccggtcaacttcaaggtgagcggcgggccgggagcgatctgggtcga

SEQ ID NO: 2821 - DNA, 121 bp, Homo sapiens
tcgacccagatcgctcccggcccgccgctcaccttgaagttgaccgggtccacccgaagcttgtgcgcgtgcaggtcgctcagggcggacagcgcgttgggcatgtcgtccacgtgcgcca

SEQ ID NO: 2822 - DNA, 17 bp, Homo sapiens
cgcgcacaagcttcggg

SEQ ID NO: 2823 - DNA, 17 bp, Homo sapiens
cccgaagcttgtgcgcg

SEQ ID NO: 2824 - DNA, 121 bp, Homo sapiens
acgtggacgacatgcccaacgcgctgtccgccctgagcgacctgcacgcgcacaagcttcgggtggacccggtcaacttcaaggtgagcggcgggccgggagcgatctgggtcgaggggcg

SEQ ID NO: 2825 - DNA, 121 bp, Homo sapiens
cgcccctcgacccagatcgctcccggcccgccgctcaccttgaagttgaccgggtccacccgaagcttgtgcgcgtgcaggtcgctcagggcggacagcgcgttgggcatgtcgtccacgt

SEQ ID NO: 2826 - DNA, 17 bp, Homo sapiens
caagcttcgggtggacc

SEQ ID NO: 2827 - DNA, 17 bp, Homo sapiens
ggtccacccgaagcttg

SEQ ID NO: 2828 - DNA, 121 bp, Homo sapiens
acgacatgcccaacgcgctgtccgccctgagcgacctgcacgcgcacaagcttcgggtggacccggtcaacttcaaggtgagcggcgggccgggagcgatctgggtcgaggggcgagatgg

SEQ ID NO: 2829 - DNA, 121 bp, Homo sapiens
ccatctcgcccctcgacccagatcgctcccggcccgccgctcaccttgaagttgaccgggtccacccgaagcttgtgcgcgtgcaggtcgctcagggcggacagcgcgttgggcatgtcgt

SEQ ID NO: 2830 - DNA, 17 bp, Homo sapiens
tcgggtggacccggtca

SEQ ID NO: 2831 - DNA, 17 bp, Homo sapiens
tgaccgggtccacccga

SEQ ID NO: 2832 - DNA, 121 bp, Homo sapiens
acatgcccaacgcgctgtccgccctgagcgacctgcacgcgcacaagcttcgggtggacccggtcaacttcaaggtgagcggcgggccgggagcgatctgggtcgaggggcgagatggcgc

SEQ ID NO: 2833 - DNA, 121 bp, Homo sapiens
gcgccatctcgcccctcgacccagatcgctcccggcccgccgctcaccttgaagttgaccgggtccacccgaagcttgtgcgcgtgcaggtcgctcagggcggacagcgcgttgggcatgt

SEQ ID NO: 2834 - DNA, 17 bp, Homo sapiens
ggtggacccggtcaact

SEQ ID NO: 2835 - DNA, 17 bp, Homo sapiens
agttgaccgggtccacc

SEQ ID NO: 2836 - DNA, 121 bp, Homo sapiens
cggcggctgcgggcctgggccctcggccccactgaccctcttctctgcacagctcctaagccactgcctgctggtgaccctggccgcccacctccccgccgagttcacccctgcggtgcac

SEQ ID NO: 2837 - DNA, 121 bp, Homo sapiens
gtgcaccgcaggggtgaactcggcggggaggtgggcggccagggtcaccagcaggcagtggcttaggagctgtgcagagaagagggtcagtggggccgagggcccaggcccgcagccgccg

SEQ ID NO: 2838 - DNA, 17 bp, Homo sapiens
ctcctaagccactgcct

SEQ ID NO: 2839 - DNA, 17 bp, Homo sapiens
aggcagtggcttaggag

SEQ ID NO: 2840 - DNA, 121 bp, Homo sapiens
ttctctgcacagctcctaagccactgcctgctggtgaccctggccgcccacctccccgccgagttcacccctgcggtgcacgcctccctggacaagttcctggcttctgtgagcaccgtgc

SEQ ID NO: 2841 - DNA, 121 bp, Homo sapiens
gcacggtgctcacagaagccaggaacttgtccagggaggcgtgcaccgcaggggtgaactcggcggggaggtgggcggccagggtcaccagcaggcagtggcttaggagctgtgcagagaa

SEQ ID NO: 2842 - DNA, 17 bp, Homo sapiens
tccccgccgagttcacc

SEQ ID NO: 2843 - DNA, 17 bp, Homo sapiens
ggtgaactcggcgggga

SEQ ID NO: 2844 - DNA, 121 bp, Homo sapiens
tcctaagccactgcctgctggtgaccctggccgcccacctccccgccgagttcacccctgcggtgcacgcctccctggacaagttcctggcttctgtgagcaccgtgctgacctccaaata

SEQ ID NO: 2845 - DNA, 121 bp, Homo sapiens
tatttggaggtcagcacggtgctcacagaagccaggaacttgtccagggaggcgtgcaccgcaggggtgaactcggcggggaggtgggcggccagggtcaccagcaggcagtggcttagga

SEQ ID NO: 2846 - DNA, 17 bp, Homo sapiens
cacccctgcggtgcacg

SEQ ID NO: 2847 - DNA, 17 bp, Homo sapiens
cgtgcaccgcaggggtg

SEQ ID NO: 2848 - DNA, 121 bp, Homo sapiens
tggccgcccacctccccgccgagttcacccctgcggtgcacgcctccctggacaagttcctggcttctgtgagcaccgtgctgacctccaaataccgttaagctggagcctcggtggccat

SEQ ID NO: 2849 - DNA, 121 bp, Homo sapiens
atggccaccgaggctccagcttaacggtatttggaggtcagcacggtgctcacagaagccaggaacttgtccagggaggcgtgcaccgcaggggtgaactcggcggggaggtgggcggcca

SEQ ID NO: 2850 - DNA, 17 bp, Homo sapiens
caagttcctggcttctg

SEQ ID NO: 2851 - DNA, 17 bp, Homo sapiens
cagaagccaggaacttg

SEQ ID NO: 2852 - DNA, 121 bp, Homo sapiens
tgcacgcctccctggacaagttcctggcttctgtgagcaccgtgctgacctccaaataccgttaagctggagcctcggtggccatgcttcttgccccttgggcctccccccagcccctcct

SEQ ID NO: 2853 - DNA, 121 bp, Homo sapiens
aggaggggctggggggaggcccaaggggcaagaagcatggccaccgaggctccagcttaacggtatttggaggtcagcacggtgctcacagaagccaggaacttgtccagggaggcgtgca

SEQ ID NO: 2854 - DNA, 17 bp, Homo sapiens
caaataccgttaagctg

SEQ ID NO: 2855 - DNA, 17 bp, Homo sapiens
cagcttaacggtatttg

SEQ ID NO: 2856 - DNA, 121 bp, Homo sapiens
cctggcgcgctcgcgggccggcactcttctggtccccacagactcagagagaacccaccatggtgctgtctcctgccgacaagaccaacgtcaaggccgcctggggtaaggtcggcgcgca

SEQ ID NO: 2857 - DNA, 121 bp, Homo sapiens
tgcgcgccgaccttaccccaggcggccttgacgttggtcttgtcggcaggagacagcaccatggtgggttctctctgagtctgtggggaccagaagagtgccggcccgcgagcgcgccagg

SEQ ID NO: 2858 - DNA, 17 bp, Homo sapiens
acccaccatggtgctgt

SEQ ID NO: 2859 - DNA, 17 bp, Homo sapiens
acagcaccatggtgggt

SEQ ID NO: 2860 - DNA, 121 bp, Homo sapiens; identical to SEQ ID NO: 2780

SEQ ID NO: 2861 - DNA, 121 bp, Homo sapiens; identical to SEQ ID NO: 2781

SEQ ID NO: 2862 - DNA, 17 bp, Homo sapiens
cgtcaaggccgcctggg

SEQ ID NO: 2863 - DNA, 17 bp, Homo sapiens
cccaggcggccttgacg

SEQ ID NO: 2864 - DNA, 121 bp, Homo sapiens
agagaacccaccatggtgctgtctcctgccgacaagaccaacgtcaaggccgcctggggtaaggtcggcgcgcacgctggcgagtatggtgcggaggccctggagaggtgaggctccctcc

SEQ ID NO: 2865 - DNA, 121 bp, Homo sapiens
ggagggagcctcacctctccagggcctccgcaccatactcgccagcgtgcgcgccgaccttaccccaggcggccttgacgttggtcttgtcggcaggagacagcaccatggtgggttctct

SEQ ID NO: 2866 - DNA, 17 bp, Homo sapiens
cctggggtaaggtcggc

SEQ ID NO: 2867 - DNA, 17 bp, Homo sapiens
gccgaccttaccccagg

SEQ ID NO: 2868 - DNA, 121 bp, Homo sapiens
ggtgctgtctcctgccgacaagaccaacgtcaaggccgcctggggtaaggtcggcgcgcacgctggcgagtatggtgcggaggccctggagaggtgaggctccctcccctgctccgacccg

SEQ ID NO: 2869 - DNA, 121 bp, Homo sapiens
cgggtcggagcaggggagggagcctcacctctccagggcctccgcaccatactcgccagcgtgcgcgccgaccttaccccaggcggccttgacgttggtcttgtcggcaggagacagcacc

SEQ ID NO: 2870 - DNA, 17 bp, Homo sapiens
ggcgcgcacgctggcga

SEQ ID NO: 2871 - DNA, 17 bp, Homo sapiens
tcgccagcgtgcgcgcc

SEQ ID NO: 2872 - DNA, 121 bp, Homo sapiens; identical to SEQ ID NO: 2792

SEQ ID NO: 2873 - DNA, 121 bp, Homo sapiens; identical to SEQ ID NO: 2793

SEQ ID NO: 2874 - DNA, 17 bp, Homo sapiens
ggtgcggaggccctgga

SEQ ID NO: 2875 - DNA, 17 bp, Homo sapiens
tccagggcctccgcacc

SEQ ID NO: 2876 - DNA, 121 bp, Homo sapiens
acgtcaaggccgcctggggtaaggtcggcgcgcacgctggcgagtatggtgcggaggccctggagaggtgaggctccctcccctgctccgacccgggctcctcgcccgcccggacccacag

SEQ ID NO: 2877 - DNA, 121 bp, Homo sapiens
ctgtgggtccgggcgggcgaggagcccgggtcggagcaggggagggagcctcacctctccagggcctccgcaccatactcgccagcgtgcgcgccgaccttaccccaggcggccttgacgt

SEQ ID NO: 2878 - DNA, 17 bp, Homo sapiens
ggaggccctggagaggt

SEQ ID NO: 2879 - DNA, 17 bp, Homo sapiens
acctctccagggcctcc

SEQ ID NO: 2880 - DNA, 121 bp, Homo sapiens
gcttctccccgcaggatgttcctgtccttccccaccaccaagacctacttcccgcacttcgacctgagccacggctctgcccaggttaagggccacggcaagaaggtggccgacgcgctga

SEQ ID NO: 2881 - DNA, 121 bp, Homo sapiens
tcagcgcgtcggccaccttcttgccgtggcccttaacctgggcagagccgtggctcaggtcgaagtgcgggaagtaggtcttggtggtggggaaggacaggaacatcctgcggggagaagc

SEQ ID NO: 2882 - DNA, 17 bp, Homo sapiens
cgcacttcgacctgagc

SEQ ID NO: 2883 - DNA, 17 bp, Homo sapiens
gctcaggtcgaagtgcg

SEQ ID NO: 2884 - DNA, 121 bp, Homo sapiens
ctccccgcaggatgttcctgtccttccccaccaccaagacctacttcccgcacttcgacctgagccacggctctgcccaggttaagggccacggcaagaaggtggccgacgcgctgaccaa

SEQ ID NO: 2885 - DNA, 121 bp, Homo sapiens
ttggtcagcgcgtcggccaccttcttgccgtggcccttaacctgggcagagccgtggctcaggtcgaagtgcgggaagtaggtcttggtggtggggaaggacaggaacatcctgcggggag

SEQ ID NO: 2886 - DNA, 17 bp, Homo sapiens
cttcgacctgagccacg

SEQ ID NO: 2887 - DNA, 17 bp, Homo sapiens
cgtggctcaggtcgaag

SEQ ID NO: 2888 - DNA, 121 bp, Homo sapiens
ctgtccttccccaccaccaagacctacttcccgcacttcgacctgagccacggctctgcccaggttaagggccacggcaagaaggtggccgacgcgctgaccaacgccgtggcgcacgtgg

SEQ ID NO: 2889 - DNA, 121 bp, Homo sapiens
ccacgtgcgccacggcgttggtcagcgcgtcggccaccttcttgccgtggcccttaacctgggcagagccgtggctcaggtcgaagtgcgggaagtaggtcttggtggtggggaaggacag

SEQ ID NO: 2890 - DNA, 17 bp, Homo sapiens
gctctgcccaggttaag

SEQ ID NO: 2891 - DNA, 17 bp, Homo sapiens
cttaacctgggcagagc

SEQ ID NO: 2892 - DNA, 121 bp, Homo sapiens
ccaagacctacttcccgcacttcgacctgagccacggctctgcccaggttaagggccacggcaagaaggtggccgacgcgctgaccaacgccgtggcgcacgtggacgacatgcccaacgc

SEQ ID NO: 2893 - DNA, 121 bp, Homo sapiens
gcgttgggcatgtcgtccacgtgcgccacggcgttggtcagcgcgtcggccaccttcttgccgtggcccttaacctgggcagagccgtggctcaggtcgaagtgcgggaagtaggtcttgg

SEQ ID NO: 2894 - DNA, 17 bp, Homo sapiens
gggccacggcaagaagg

SEQ ID NO: 2895 - DNA, 17 bp, Homo sapiens
ccttcttgccgtggccc

SEQ ID NO: 2896 - DNA, 121 bp, Homo sapiens; identical to SEQ ID NO: 2796

SEQ ID NO: 2897 - DNA, 121 bp, Homo sapiens; identical to SEQ ID NO: 2797

SEQ ID NO: 2898 - DNA, 17 bp, Homo sapiens
ctgaccaacgccgtggc

SEQ ID NO: 2899 - DNA, 17 bp, Homo sapiens
gccacggcgttggtcag

SEQ ID NO: 2900 - DNA, 121 bp, Homo sapiens; identical to SEQ ID NO: 2796

SEQ ID NO: 2901 - DNA, 121 bp, Homo sapiens; identical to SEQ ID NO: 2797

SEQ ID NO: 2902 - DNA, 17 bp, Homo sapiens
ctgaccaacgccgtggc

SEQ ID NO: 2903 - DNA, 17 bp, Homo sapiens
gccacggcgttggtcag

SEQ ID NO: 2904 - DNA, 121 bp, Homo sapiens
cggcaagaaggtggccgacgcgctgaccaacgccgtggcgcacgtggacgacatgcccaacgcgctgtccgccctgagcgacctgcacgcgcacaagcttcgggtggacccggtcaacttc

SEQ ID NO: 2905 - DNA, 121 bp, Homo sapiens
gaagttgaccgggtccacccgaagcttgtgcgcgtgcaggtcgctcagggcggacagcgcgttgggcatgtcgtccacgtgcgccacggcgttggtcagcgcgtcggccaccttcttgccg

SEQ ID NO: 2906 - DNA, 17 bp, Homo sapiens
atgcccaacgcgctgtc

SEQ ID NO: 2907 - DNA, 17 bp, Homo sapiens
gacagcgcgttgggcat

SEQ ID NO: 2908 - DNA, 121 bp, Homo sapiens
cgctgaccaacgccgtggcgcacgtggacgacatgcccaacgcgctgtccgccctgagcgacctgcacgcgcacaagcttcgggtggacccggtcaacttcaaggtgagcggcgggccggg

SEQ ID NO: 2909 - DNA, 121 bp, Homo sapiens
cccggcccgccgctcaccttgaagttgaccgggtccacccgaagcttgtgcgcgtgcaggtcgctcagggcggacagcgcgttgggcatgtcgtccacgtgcgccacggcgttggtcagcg

SEQ ID NO: 2910 - DNA, 17 bp, Homo sapiens
cctgagcgacctgcacg

SEQ ID NO: 2911 - DNA, 17 bp, Homo sapiens
cgtgcaggtcgctcagg

SEQ ID NO: 2912 - DNA, 121 bp, Homo sapiens; identical to SEQ ID NO: 2816

SEQ ID NO: 2913 - DNA, 121 bp, Homo sapiens; identical to SEQ ID NO: 2817

SEQ ID NO: 2914 - DNA, 17 bp, Homo sapiens
gcgcacaagcttcgggt

SEQ ID NO: 2915 - DNA, 17 bp, Homo sapiens
acccgaagcttgtgcgc

SEQ ID NO: 2916 - DNA, 121 bp, Homo sapiens
gacgacatgcccaacgcgctgtccgccctgagcgacctgcacgcgcacaagcttcgggtggacccggtcaacttcaaggtgagcggcgggccgggagcgatctgggtcgaggggcgagatg

SEQ ID NO: 2917 - DNA, 121 bp, Homo sapiens
catctcgcccctcgacccagatcgctcccggcccgccgctcaccttgaagttgaccgggtccacccgaagcttgtgcgcgtgcaggtcgctcagggcggacagcgcgttgggcatgtcgtc

SEQ ID NO: 2918 - DNA, 17 bp, Homo sapiens
ttcgggtggacccggtc

SEQ ID NO: 2919 - DNA, 17 bp, Homo sapiens
gaccgggtccacccgaa

SEQ ID NO: 2920 - DNA, 121 bp, Homo sapiens; identical to SEQ ID NO: 2832

SEQ ID NO: 2921 - DNA, 121 bp, Homo sapiens; identical to SEQ ID NO: 2833

SEQ ID NO: 2922 - DNA, 17 bp, Homo sapiens
ggtggacccggtcaact

SEQ ID NO: 2923 - DNA, 17 bp, Homo sapiens
agttgaccgggtccacc

SEQ ID NO: 2924 - DNA, 121 bp, Homo sapiens
tagcgcaggcggcggctgcgggcctgggccgcactgaccctcttctctgcacagctcctaagccactgcctgctggtgaccctggccgcccacctccccgccgagttcacccctgcggtgc

SEQ ID NO: 2925 - DNA, 121 bp, Homo sapiens
gcaccgcaggggtgaactcggcggggaggtgggcggccagggtcaccagcaggcagtggcttaggagctgtgcagagaagagggtcagtgcggcccaggcccgcagccgccgcctgcgcta

SEQ ID NO: 2926 - DNA, 17 bp, Homo sapiens
agctcctaagccactgc

SEQ ID NO: 2927 - DNA, 17 bp, Homo sapiens
gcagtggcttaggagct

SEQ ID NO: 2928 - DNA, 121 bp, Homo sapiens
ggcggcggctgcgggcctgggccgcactgaccctcttctctgcacagctcctaagccactgcctgctggtgaccctggccgcccacctccccgccgagttcacccctgcggtgcacgcctc

SEQ ID NO: 2929 - DNA, 121 bp, Homo sapiens
gaggcgtgcaccgcaggggtgaactcggcggggaggtgggcggccagggtcaccagcaggcagtggcttaggagctgtgcagagaagagggtcagtgcggcccaggcccgcagccgccgcc

SEQ ID NO: 2930 - DNA, 17 bp, Homo sapiens
aagccactgcctgctgg

SEQ ID NO: 2931 - DNA, 17 bp, Homo sapiens
ccagcaggcagtggctt

SEQ ID NO: 2932 - DNA, 121 bp, Homo sapiens
ccgcactgaccctcttctctgcacagctcctaagccactgcctgctggtgaccctggccgcccacctccccgccgagttcacccctgcggtgcacgcctccctggacaagttcctggcttc

SEQ ID NO: 2933 - DNA, 121 bp, Homo sapiens
gaagccaggaacttgtccagggaggcgtgcaccgcaggggtgaactcggcggggaggtgggcggccagggtcaccagcaggcagtggcttaggagctgtgcagagaagagggtcagtgcgg

SEQ ID NO: 2934 - DNA, 17 bp, Homo sapiens
cctggccgcccacctcc

SEQ ID NO: 2935 - DNA, 17 bp, Homo sapiens
ggaggtgggcggccagg

SEQ ID NO: 2936 - DNA, 121 bp, Homo sapiens; identical to SEQ ID NO: 2844

SEQ ID NO: 2937 - DNA, 121 bp, Homo sapiens; identical to SEQ ID NO: 2845

SEQ ID NO: 2938 - DNA, 17 bp, Homo sapiens
cacccctgcggtgcacg

SEQ ID NO: 2939 - DNA, 17 bp, Homo sapiens
cgtgcaccgcaggggtg

SEQ ID NO: 2940 - DNA, 121 bp, Homo sapiens
ccactgcctgctggtgaccctggccgcccacctccccgccgagttcacccctgcggtgcacgcctccctggacaagttcctggcttctgtgagcaccgtgctgacctccaaataccgttaa

SEQ ID NO: 2941 - DNA, 121 bp, Homo sapiens
ttaacggtatttggaggtcagcacggtgctcacagaagccaggaacttgtccagggaggcgtgcaccgcaggggtgaactcggcggggaggtgggcggccagggtcaccagcaggcagtgg

SEQ ID NO: 2942 - DNA, 17 bp, Homo sapiens
gcggtgcacgcctccct

SEQ ID NO: 2943 - DNA, 17 bp, Homo sapiens
agggaggcgtgcaccgc

SEQ ID NO: 2944 - DNA, 121 bp, Homo sapiens
cactgcctgctggtgaccctggccgcccacctccccgccgagttcacccctgcggtgcacgcctccctggacaagttcctggcttctgtgagcaccgtgctgacctccaaataccgttaag

SEQ ID NO: 2945 - DNA, 121 bp, Homo sapiens
cttaacggtatttggaggtcagcacggtgctcacagaagccaggaacttgtccagggaggcgtgcaccgcaggggtgaactcggcggggaggtgggcggccagggtcaccagcaggcagtg

SEQ ID NO: 2946 - DNA, 17 bp, Homo sapiens
cggtgcacgcctccctg

SEQ ID NO: 2947 - DNA, 17 bp, Homo sapiens
cagggaggcgtgcaccg

SEQ ID NO: 2948 - DNA, 121 bp, Homo sapiens
tgctggtgaccctggccgcccacctccccgccgagttcacccctgcggtgcacgcctccctggacaagttcctggcttctgtgagcaccgtgctgacctccaaataccgttaagctggagc

SEQ ID NO: 2949 - DNA, 121 bp, Homo sapiens
gctccagcttaacggtatttggaggtcagcacggtgctcacagaagccaggaacttgtccagggaggcgtgcaccgcaggggtgaactcggcggggaggtgggcggccagggtcaccagca

SEQ ID NO: 2950 - DNA, 17 bp, Homo sapiens
cgcctccctggacaagt

SEQ ID NO: 2951 - DNA, 17 bp, Homo sapiens
acttgtccagggaggcg

SEQ ID NO: 2952 - DNA, 121 bp, Homo sapiens
gcccacctccccgccgagttcacccctgcggtgcacgcctccctggacaagttcctggcttctgtgagcaccgtgctgacctccaaataccgttaagctggagcctcggtagccgttcctc

SEQ ID NO: 2953 - DNA, 121 bp, Homo sapiens
gaggaacggctaccgaggctccagcttaacggtatttggaggtcagcacggtgctcacagaagccaggaacttgtccagggaggcgtgcaccgcaggggtgaactcggcggggaggtgggc

SEQ ID NO: 2954 - DNA, 17 bp, Homo sapiens
tcctggcttctgtgagc

SEQ ID NO: 2955 - DNA, 17 bp, Homo sapiens
gctcacagaagccagga

SEQ ID NO: 2956 - DNA, 121 bp, Homo sapiens
gagttcacccctgcggtgcacgcctccctggacaagttcctggcttctgtgagcaccgtgctgacctccaaataccgttaagctggagcctcggtagccgttcctcctgcccgctgggcct

SEQ ID NO: 2957 - DNA, 121 bp, Homo sapiens
aggcccagcgggcaggaggaacggctaccgaggctccagcttaacggtatttggaggtcagcacggtgctcacagaagccaggaacttgtccagggaggcgtgcaccgcaggggtgaactc

SEQ ID NO: 2958 - DNA, 17 bp, Homo sapiens
gcaccgtgctgacctcc

SEQ ID NO: 2959 - DNA, 17 bp, Homo sapiens
ggaggtcagcacggtgc

SEQ ID NO: 2960 - DNA, 121 bp, Homo sapiens
agttcacccctgcggtgcacgcctccctggacaagttcctggcttctgtgagcaccgtgctgacctccaaataccgttaagctggagcctcggtagccgttcctcctgcccgctgggcctc

SEQ ID NO: 2961 - DNA, 121 bp, Homo sapiens
gaggcccagcgggcaggaggaacggctaccgaggctccagcttaacggtatttggaggtcagcacggtgctcacagaagccaggaacttgtccagggaggcgtgcaccgcaggggtgaact

SEQ ID NO: 2962 - DNA, 17 bp, Homo sapiens
caccgtgctgacctcca

SEQ ID NO: 2963 - DNA, 17 bp, Homo sapiens
tggaggtcagcacggtg

SEQ ID NO: 2964 - DNA, 121 bp, Homo sapiens
gtgcacgcctccctggacaagttcctggcttctgtgagcaccgtgctgacctccaaataccgttaagctggagcctcggtagccgttcctcctgcccgctgggcctcccaacgggccctcc

SEQ ID NO: 2965 - DNA, 121 bp, Homo sapiens
ggagggcccgttgggaggcccagcgggcaggaggaacggctaccgaggctccagcttaacggtatttggaggtcagcacggtgctcacagaagccaggaacttgtccagggaggcgtgcac

SEQ ID NO: 2966 - DNA, 17 bp, Homo sapiens
ccaaataccgttaagct

SEQ ID NO: 2967 - DNA, 17 bp, Homo sapiens
agcttaacggtatttgg

SEQ ID NO: 2968 - DNA, 121 bp, Homo sapiens
cacgcctccctggacaagttcctggcttctgtgagcaccgtgctgacctccaaataccgttaagctggagcctcggtagccgttcctcctgcccgctgggcctcccaacgggccctcctcc

SEQ ID NO: 2969 - DNA, 121 bp, Homo sapiens
ggaggagggcccgttgggaggcccagcgggcaggaggaacggctaccgaggctccagcttaacggtatttggaggtcagcacggtgctcacagaagccaggaacttgtccagggaggcgtg

SEQ ID NO: 2970 - DNA, 17 bp, Homo sapiens
aataccgttaagctgga

SEQ ID NO: 2971 - DNA, 17 bp, Homo sapiens
tccagcttaacggtatt

SEQ ID NO: 2972 - DNA, 121 bp, Homo sapiens; identical to SEQ ID NO: 2968

SEQ ID NO: 2973 - DNA, 121 bp, Homo sapiens; identical to SEQ ID NO: 2969

SEQ ID NO: 2974 - DNA, 17 bp, Homo sapiens
aataccgttaagctgga

SEQ ID NO: 2975 - DNA, 17 bp, Homo sapiens
tccagcttaacggtatt

SEQ ID NO: 2976 - DNA, 121 bp, Homo sapiens
cgcctccctggacaagttcctggcttctgtgagcaccgtgctgacctccaaataccgttaagctggagcctcggtagccgttcctcctgcccgctgggcctcccaacgggccctcctcccc

SEQ ID NO: 2977 - DNA, 121 bp, Homo sapiens
ggggaggagggcccgttgggaggcccagcgggcaggaggaacggctaccgaggctccagcttaacggtatttggaggtcagcacggtgctcacagaagccaggaacttgtccagggaggcg

SEQ ID NO: 2978 - DNA, 17 bp, Homo sapiens
taccgttaagctggagc

SEQ ID NO: 2979 - DNA, 17 bp, Homo sapiens
gctccagcttaacggta

SEQ ID NO: 2980 - DNA, 121 bp, Homo sapiens
ttggctgaaggcacttccgttgagcatctagacgtttccttggctcttctggcgccaaaatgtcgttcgtggcaggggttattcggcggctggacgagacagtggtgaaccgcatcgcggc

SEQ ID NO: 2981 - DNA, 121 bp, Homo sapiens
gccgcgatgcggttcaccactgtctcgtccagccgccgaataacccctgccacgaacgacattttggcgccagaagagccaaggaaacgtctagatgctcaacggaagtgccttcagccaa

SEQ ID NO: 2982 - DNA, 17 bp, Homo sapiens
cgccaaaatgtcgttcg

SEQ ID NO: 2983 - DNA, 17 bp, Homo sapiens
cgaacgacattttggcg

SEQ ID NO: 2984 - DNA, 121 bp, Homo sapiens; identical to SEQ ID NO: 2980

SEQ ID NO: 2985 - DNA, 121 bp, Homo sapiens; identical to SEQ ID NO: 2981

SEQ ID NO: 2986 - DNA, 17 bp, Homo sapiens
cgccaaaatgtcgttcg

SEQ ID NO: 2987 - DNA, 17 bp, Homo sapiens
cgaacgacattttggcg

SEQ ID NO: 2988 - DNA, 121 bp, Homo sapiens
tggtgaaccgcatcgcggcgggggaagttatccagcggccagctaatgctatcaaagagatgattgagaactggtacggagggagtcgagccgggctcacttaagggctacgacttaacgg

SEQ ID NO: 2989 - DNA, 121 bp, Homo sapiens
ccgttaagtcgtagcccttaagtgagcccggctcgactccctccgtaccagttctcaatcatctctttgatagcattagctggccgctggataacttcccccgccgcgatgcggttcacca

SEQ ID NO: 2990 - DNA, 17 bp, Homo sapiens
caaagagatgattgaga

SEQ ID NO: 2991 - DNA, 17 bp, Homo sapiens
tctcaatcatctctttg

SEQ ID NO: 2992 - DNA, 121 bp, Homo sapiens
tagagtagttgcagactgataaattattttctgtttgatttgccagtttagatgcaaaatccacaagtattcaagtgattgttaaagagggaggcctgaagttgattcagatccaagacaa

SEQ ID NO: 2993 - DNA, 121 bp, Homo sapiens
ttgtcttggatctgaatcaacttcaggcctccctctttaacaatcacttgaatacttgtggattttgcatctaaactggcaaatcaaacagaaaataatttatcagtctgcaactactcta

SEQ ID NO: 2994 - DNA, 17 bp, Homo sapiens
tgcaaaatccacaagta

SEQ ID NO: 2995 - DNA, 17 bp, Homo sapiens
tacttgtggattttgca

SEQ ID NO: 2996 - DNA, 121 bp, Homo sapiens
gcaaaatccacaagtattcaagtgattgttaaagagggaggcctgaagttgattcagatccaagacaatggcaccgggatcagggtaagtaaaacctcaaagtagcaggatgtttgtgcgc

SEQ ID NO: 2997 - DNA, 121 bp, Homo sapiens
gcgcacaaacatcctgctactttgaggttttacttaccctgatcccggtgccattgtcttggatctgaatcaacttcaggcctccctctttaacaatcacttgaatacttgtggattttgc

SEQ ID NO: 2998 - DNA, 17 bp, Homo sapiens
ttcagatccaagacaat

SEQ ID NO: 2999 - DNA, 17 bp, Homo sapiens
attgtcttggatctgaa

SEQ ID NO: 3000 - DNA, 121 bp, Homo sapiens; identical to SEQ ID NO: 2996

SEQ ID NO: 3001 - DNA, 121 bp, Homo sapiens; identical to SEQ ID NO: 2997

SEQ ID NO: 3002 - DNA, 17 bp, Homo sapiens
ttcagatccaagacaat

SEQ ID NO: 3003 - DNA, 17 bp, Homo sapiens
attgtcttggatctgaa

SEQ ID NO: 3004 - DNA, 121 bp, Homo sapiens
ccacaagtattcaagtgattgttaaagagggaggcctgaagttgattcagatccaagacaatggcaccgggatcagggtaagtaaaacctcaaagtagcaggatgtttgtgcgcttcatgg

SEQ ID NO: 3005 - DNA, 121 bp, Homo sapiens
ccatgaagcgcacaaacatcctgctactttgaggttttacttaccctgatcccggtgccattgtcttggatctgaatcaacttcaggcctccctctttaacaatcacttgaatacttgtgg

SEQ ID NO: 3006 - DNA, 17 bp, Homo sapiens
ccaagacaatggcaccg

SEQ ID NO: 3007 - DNA, 17 bp, Homo sapiens
cggtgccattgtcttgg

SEQ ID NO: 3008 - DNA, 121 bp, Homo sapiens
attcaagtgattgttaaagagggaggcctgaagttgattcagatccaagacaatggcaccgggatcagggtaagtaaaacctcaaagtagcaggatgtttgtgcgcttcatggaagagtca

SEQ ID NO: 3009 - DNA, 121 bp, Homo sapiens
tgactcttccatgaagcgcacaaacatcctgctactttgaggttttacttaccctgatcccggtgccattgtcttggatctgaatcaacttcaggcctccctctttaacaatcacttgaat

SEQ ID NO: 3010 - DNA, 17 bp, Homo sapiens
atggcaccgggatcagg

SEQ ID NO: 3011 - DNA, 17 bp, Homo sapiens
cctgatcccggtgccat

SEQ ID NO: 3012 - DNA, 121 bp, Homo sapiens; identical to SEQ ID NO: 3008

SEQ ID NO: 3013 - DNA, 121 bp, Homo sapiens; identical to SEQ ID NO: 3009

SEQ ID NO: 3014 - DNA, 17 bp, Homo sapiens
atggcaccgggatcagg

SEQ ID NO: 3015 - DNA, 17 bp, Homo sapiens
cctgatcccggtgccat

SEQ ID NO: 3016 - DNA, 121 bp, Homo sapiens; identical to SEQ ID NO: 3008

SEQ ID NO: 3017 - DNA, 121 bp, Homo sapiens; identical to SEQ ID NO: 3009

SEQ ID NO: 3018 - DNA, 17 bp, Homo sapiens
atggcaccgggatcagg

SEQ ID NO: 3019 - DNA, 17 bp, Homo sapiens
cctgatcccggtgccat

SEQ ID NO: 3020 - DNA, 121 bp, Homo sapiens
gtaacatgattatttactcatctttttggtatctaacagaaagaagatctggatattgtatgtgaaaggttcactactagtaaactgcagtcctttgaggatttagccagtatttctacct

SEQ ID NO: 3021 - DNA, 121 bp, Homo sapiens
aggtagaaatactggctaaatcctcaaaggactgcagtttactagtagtgaacctttcacatacaatatccagatcttctttctgttagataccaaaaagatgagtaaataatcatgttac

SEQ ID NO: 3022 - DNA, 17 bp, Homo sapiens
atattgtatgtgaaagg

SEQ ID NO: 3023 - DNA, 17 bp, Homo sapiens
cctttcacatacaatat

SEQ ID NO: 3024 - DNA, 121 bp, Homo sapiens
taacatgattatttactcatctttttggtatctaacagaaagaagatctggatattgtatgtgaaaggttcactactagtaaactgcagtcctttgaggatttagccagtatttctaccta

SEQ ID NO: 3025 - DNA, 121 bp, Homo sapiens
taggtagaaatactggctaaatcctcaaaggactgcagtttactagtagtgaacctttcacatacaatatccagatcttctttctgttagataccaaaaagatgagtaaataatcatgtta

SEQ ID NO: 3026 - DNA, 17 bp, Homo sapiens
tattgtatgtgaaaggt

SEQ ID NO: 3027 - DNA, 17 bp, Homo sapiens
acctttcacatacaata

SEQ ID NO: 3028 - DNA, 121 bp, Homo sapiens
ctggatattgtatgtgaaaggttcactactagtaaactgcagtcctttgaggatttagccagtatttctacctatggctttcgaggtgaggtaagctaaagattcaagaaatgtgtaaaat

SEQ ID NO: 3029 - DNA, 121 bp, Homo sapiens
attttacacatttcttgaatctttagcttacctcacctcgaaagccataggtagaaatactggctaaatcctcaaaggactgcagtttactagtagtgaacctttcacatacaatatccag

SEQ ID NO: 3030 - DNA, 17 bp, Homo sapiens
atttagccagtatttct

SEQ ID NO: 3031 - DNA, 17 bp, Homo sapiens
agaaatactggctaaat

SEQ ID NO: 3032 - DNA, 121 bp, Homo sapiens
ttcactactagtaaactgcagtcctttgaggatttagccagtatttctacctatggctttcgaggtgaggtaagctaaagattcaagaaatgtgtaaaatatcctcctgtgatgacattgt

SEQ ID NO: 3033 - DNA, 121 bp, Homo sapiens
acaatgtcatcacaggaggatattttacacatttcttgaatctttagcttacctcacctcgaaagccataggtagaaatactggctaaatcctcaaaggactgcagtttactagtagtgaa

SEQ ID NO: 3034 - DNA, 17 bp, Homo sapiens
atggctttcgaggtgag

SEQ ID NO: 3035 - DNA, 17 bp, Homo sapiens
ctcacctcgaaagccat

SEQ ID NO: 3036 - DNA, 121 bp, Homo sapiens
acccagcagtgagtttttctttcagtctattttcttttcttccttaggctttggccagcataagccatgtggctcatgttactattacaacgaaaacagctgatggaaagtgtgcatacag

SEQ ID NO: 3037 - DNA, 121 bp, Homo sapiens
ctgtatgcacactttccatcagctgttttcgttgtaatagtaacatgagccacatggcttatgctggccaaagcctaaggaagaaaagaaaatagactgaaagaaaaactcactgctgggt

SEQ ID NO: 3038 - DNA, 17 bp, Homo sapiens
ggccagcataagccatg

SEQ ID NO: 3039 - DNA, 17 bp, Homo sapiens
catggcttatgctggcc

SEQ ID NO: 3040 - DNA, 121 bp, Homo sapiens
tttcttttcttccttaggctttggccagcataagccatgtggctcatgttactattacaacgaaaacagctgatggaaagtgtgcatacaggtatagtgctgacttcttttactcatatat

SEQ ID NO: 3041 - DNA, 121 bp, Homo sapiens
atatatgagtaaaagaagtcagcactatacctgtatgcacactttccatcagctgttttcgttgtaatagtaacatgagccacatggcttatgctggccaaagcctaaggaagaaaagaaa

SEQ ID NO: 3042 - DNA, 17 bp, Homo sapiens
tattacaacgaaaacag

SEQ ID NO: 3043 - DNA, 17 bp, Homo sapiens
ctgttttcgttgtaata

SEQ ID NO: 3044 - DNA, 121 bp, Homo sapiens; identical to SEQ ID NO: 3040

SEQ ID NO: 3045 - DNA, 121 bp, Homo sapiens; identical to SEQ ID NO: 3041

SEQ ID NO: 3046 - DNA, 17 bp, Homo sapiens
tattacaacgaaaacag

SEQ ID NO: 3047 - DNA, 17 bp, Homo sapiens
ctgttttcgttgtaata

SEQ ID NO: 3048 - DNA, 121 bp, Homo sapiens
tctatctctctactggatattaatttgttatattttctcattagagcaagttactcagatggaaaactgaaagcccctcctaaaccatgtgctggcaatcaagggacccagatcacggtaa

SEQ ID NO: 3049 - DNA, 121 bp, Homo sapiens
ttaccgtgatctgggtcccttgattgccagcacatggtttaggaggggctttcagttttccatctgagtaacttgctctaatgagaaaatataacaaattaatatccagtagagagataga

SEQ ID NO: 3050 - DNA, 17 bp, Homo sapiens
actcagatggaaaactg

SEQ ID NO: 3051 - DNA, 17 bp, Homo sapiens
cagttttccatctgagt

SEQ ID NO: 3052 - DNA, 121 bp, Homo sapiens
tagtgtgtgtttttggcaactcttttcttactcttttgtttttcttttccaggtattcagtacacaatgcaggcattagtttctcagttaaaaaagtaagttcttggtttatgggggatgg

SEQ ID NO: 3053 - DNA, 121 bp, Homo sapiens
ccatcccccataaaccaagaacttacttttttaactgagaaactaatgcctgcattgtgtactgaatacctggaaaagaaaaacaaaagagtaagaaaagagttgccaaaaacacacacta

SEQ ID NO: 3054 - DNA, 17 bp, Homo sapiens
gtattcagtacacaatg

SEQ ID NO: 3055 - DNA, 17 bp, Homo sapiens
cattgtgtactgaatac

SEQ ID NO: 3056 - DNA, 121 bp, Homo sapiens
tttcttactcttttgtttttcttttccaggtattcagtacacaatgcaggcattagtttctcagttaaaaaagtaagttcttggtttatgggggatggttttgttttatgaaaagaaaaaa

SEQ ID NO: 3057 - DNA, 121 bp, Homo sapiens
ttttttcttttcataaaacaaaaccatcccccataaaccaagaacttacttttttaactgagaaactaatgcctgcattgtgtactgaatacctggaaaagaaaaacaaaagagtaagaaa

SEQ ID NO: 3058 - DNA, 17 bp, Homo sapiens
ttagtttctcagttaaa

SEQ ID NO: 3059 - DNA, 17 bp, Homo sapiens
tttaactgagaaactaa

SEQ ID NO: 3060 - DNA, 121 bp, Homo sapiens
tttgtttatcagcaaggagagacagtagctgatgttaggacactacccaatgcctcaaccgtggacaatattcgctccatctttggaaatgctgttagtcggtatgtcgataacctatata

SEQ ID NO: 3061 - DNA, 121 bp, Homo sapiens
tatataggttatcgacataccgactaacagcatttccaaagatggagcgaatattgtccacggttgaggcattgggtagtgtcctaacatcagctactgtctctccttgctgataaacaaa

SEQ ID NO: 3062 - DNA, 17 bp, Homo sapiens
cctcaaccgtggacaat

SEQ ID NO: 3063 - DNA, 17 bp, Homo sapiens
attgtccacggttgagg

SEQ ID NO: 3064 - DNA, 121 bp, Homo sapiens
caaggagagacagtagctgatgttaggacactacccaatgcctcaaccgtggacaatattcgctccatctttggaaatgctgttagtcggtatgtcgataacctatataaaaaaatctttt

SEQ ID NO: 3065 - DNA, 121 bp, Homo sapiens
aaaagatttttttatataggttatcgacataccgactaacagcatttccaaagatggagcgaatattgtccacggttgaggcattgggtagtgtcctaacatcagctactgtctctccttg

SEQ ID NO: 3066 - DNA, 17 bp, Homo sapiens
acaatattcgctccatc

SEQ ID NO: 3067 - DNA, 17 bp, Homo sapiens
gatggagcgaatattgt

SEQ ID NO: 3068 - DNA, 121 bp, Homo sapiens
gagacagtagctgatgttaggacactacccaatgcctcaaccgtggacaatattcgctccatctttggaaatgctgttagtcggtatgtcgataacctatataaaaaaatcttttacattt

SEQ ID NO: 3069 - DNA, 121 bp, Homo sapiens
aaatgtaaaagatttttttatataggttatcgacataccgactaacagcatttccaaagatggagcgaatattgtccacggttgaggcattgggtagtgtcctaacatcagctactgtctc

SEQ ID NO: 3070 - DNA, 17 bp, Homo sapiens
ttcgctccatctttgga

SEQ ID NO: 3071 - DNA, 17 bp, Homo sapiens
tccaaagatggagcgaa

SEQ ID NO: 3072 - DNA, 121 bp, Homo sapiens
ctaatagagaactgatagaaattggatgtgaggataaaaccctagccttcaaaatgaatggttacatatccaatgcaaactactcagtgaagaagtgcatcttcttactcttcatcaaccg

SEQ ID NO: 3073 - DNA, 121 bp, Homo sapiens
cggttgatgaagagtaagaagatgcacttcttcactgagtagtttgcattggatatgtaaccattcattttgaaggctagggttttatcctcacatccaatttctatcagttctctattag

SEQ ID NO: 3074 - DNA, 17 bp, Homo sapiens
aatgaatggttacatat

SEQ ID NO: 3075 - DNA, 17 bp, Homo sapiens
atatgtaaccattcatt

SEQ ID NO: 3076 - DNA, 121 bp, Homo sapiens
gatgtgaggataaaaccctagccttcaaaatgaatggttacatatccaatgcaaactactcagtgaagaagtgcatcttcttactcttcatcaaccgtaagttaaaaagaaccacatggga

SEQ ID NO: 3077 - DNA, 121 bp, Homo sapiens
tcccatgtggttctttttaacttacggttgatgaagagtaagaagatgcacttcttcactgagtagtttgcattggatatgtaaccattcattttgaaggctagggttttatcctcacatc

SEQ ID NO: 3078 - DNA, 17 bp, Homo sapiens
aaactactcagtgaaga

SEQ ID NO: 3079 - DNA, 17 bp, Homo sapiens
tcttcactgagtagttt

SEQ ID NO: 3080 - DNA, 121 bp, Homo sapiens
cacccctcaggacagttttgaactggttgctttctttttattgtttagatcgtctggtagaatcaacttccttgagaaaagccatagaaacagtgtatgcagcctatttgcccaaaaacac

SEQ ID NO: 3081 - DNA, 121 bp, Homo sapiens
gtgtttttgggcaaataggctgcatacactgtttctatggcttttctcaaggaagttgattctaccagacgatctaaacaataaaaagaaagcaaccagttcaaaactgtcctgaggggtg

SEQ ID NO: 3082 - DNA, 17 bp, Homo sapiens
tctggtagaatcaactt

SEQ ID NO: 3083 - DNA, 17 bp, Homo sapiens
aagttgattctaccaga

SEQ ID NO: 3084 - DNA, 121 bp, Homo sapiens
ccctcaggacagttttgaactggttgctttctttttattgtttagatcgtctggtagaatcaacttccttgagaaaagccatagaaacagtgtatgcagcctatttgcccaaaaacacaca

SEQ ID NO: 3085 - DNA, 121 bp, Homo sapiens
tgtgtgtttttgggcaaataggctgcatacactgtttctatggcttttctcaaggaagttgattctaccagacgatctaaacaataaaaagaaagcaaccagttcaaaactgtcctgaggg

SEQ ID NO: 3086 - DNA, 17 bp, Homo sapiens
ggtagaatcaacttcct

SEQ ID NO: 3087 - DNA, 17 bp, Homo sapiens
aggaagttgattctacc

SEQ ID NO: 3088 - DNA, 121 bp, Homo sapiens
ctttttctccccctcccactatctaaggtaattgttctctcttattttcctgacagtttagaaatcagtccccagaatgtggatgttaatgtgcaccccacaaagcatgaagttcacttcc

SEQ ID NO: 3089 - DNA, 121 bp, Homo sapiens
ggaagtgaacttcatgctttgtggggtgcacattaacatccacattctggggactgatttctaaactgtcaggaaaataagagagaacaattaccttagatagtgggagggggagaaaaag

SEQ ID NO: 3090 - DNA, 17 bp, Homo sapiens
acagtttagaaatcagt

SEQ ID NO: 3091 - DNA, 17 bp, Homo sapiens
actgatttctaaactgt

SEQ ID NO: 3092 - DNA, 121 bp, Homo sapiens
ctcccactatctaaggtaattgttctctcttattttcctgacagtttagaaatcagtccccagaatgtggatgttaatgtgcaccccacaaagcatgaagttcacttcctgcacgaggaga

SEQ ID NO: 3093 - DNA, 121 bp, Homo sapiens
tctcctcgtgcaggaagtgaacttcatgctttgtggggtgcacattaacatccacattctggggactgatttctaaactgtcaggaaaataagagagaacaattaccttagatagtgggag

SEQ ID NO: 3094 - DNA, 17 bp, Homo sapiens
tcagtccccagaatgtg

SEQ ID NO: 3095 - DNA, 17 bp, Homo sapiens
cacattctggggactga

SEQ ID NO: 3096 - DNA, 121 bp, Homo sapiens
atgtgcaccccacaaagcatgaagttcacttcctgcacgaggagagcatcctggagcgggtgcagcagcacatcgagagcaagctcctgggctccaattcctccaggatgtacttcaccca

SEQ ID NO: 3097 - DNA, 121 bp, Homo sapiens
tgggtgaagtacatcctggaggaattggagcccaggagcttgctctcgatgtgctgctgcacccgctccaggatgctctcctcgtgcaggaagtgaacttcatgctttgtggggtgcacat

SEQ ID NO: 3098 - DNA, 17 bp, Homo sapiens
ggagcgggtgcagcagc

SEQ ID NO: 3099 - DNA, 17 bp, Homo sapiens
gctgctgcacccgctcc

SEQ ID NO: 3100 - DNA, 121 bp, Homo sapiens
ccacaaagcatgaagttcacttcctgcacgaggagagcatcctggagcgggtgcagcagcacatcgagagcaagctcctgggctccaattcctccaggatgtacttcacccaggtcagggc

SEQ ID NO: 3101 - DNA, 121 bp, Homo sapiens
gccctgacctgggtgaagtacatcctggaggaattggagcccaggagcttgctctcgatgtgctgctgcacccgctccaggatgctctcctcgtgcaggaagtgaacttcatgctttgtgg

SEQ ID NO: 3102 - DNA, 17 bp, Homo sapiens
gcagcagcacatcgaga

SEQ ID NO: 3103 - DNA, 17 bp, Homo sapiens
tctcgatgtgctgctgc

SEQ ID NO: 3104 - DNA, 121 bp, Homo sapiens
caagtctgacctcgtcttctacttctggaagtagtgataaggtctatgcccaccagatggttcgtacagattcccgggaacagaagcttgatgcatttctgcagcctctgagcaaacccct

SEQ ID NO: 3105 - DNA, 121 bp, Homo sapiens
aggggtttgctcagaggctgcagaaatgcatcaagcttctgttcccgggaatctgtacgaaccatctggtgggcatagaccttatcactacttccagaagtagaagacgaggtcagacttg

SEQ ID NO: 3106 - DNA, 17 bp, Homo sapiens
ccagatggttcgtacag

SEQ ID NO: 3107 - DNA, 17 bp, Homo sapiens
ctgtacgaaccatctgg

SEQ ID NO: 3108 - DNA, 121 bp, Homo sapiens
agtggcagggctaggcagcaagatgaggagatgcttgaactcccagcccctgctgaagtggctgccaaaaatcagagcttggagggggatacaacaaaggggacttcagaaatgtcagaga

SEQ ID NO: 3109 - DNA, 121 bp, Homo sapiens
tctctgacatttctgaagtcccctttgttgtatccccctccaagctctgatttttggcagccacttcagcaggggctgggagttcaagcatctcctcatcttgctgcctagccctgccact

SEQ ID NO: 3110 - DNA, 17 bp, Homo sapiens
ctgaagtggctgccaaa

SEQ ID NO: 3111 - DNA, 17 bp, Homo sapiens
tttggcagccacttcag

SEQ ID NO: 3112 - DNA, 121 bp, Homo sapiens
cttcattgcagaaagagacatcgggaagattctgatgtggaaatggtggaagatgattcccgaaaggaaatgactgcagcttgtaccccccggagaaggatcattaacctcactagtgttt

SEQ ID NO: 3113 - DNA, 121 bp, Homo sapiens
aaacactagtgaggttaatgatccttctccggggggtacaagctgcagtcatttcctttcgggaatcatcttccaccatttccacatcagaatcttcccgatgtctctttctgcaatgaag

SEQ ID NO: 3114 - DNA, 17 bp, Homo sapiens
atgattcccgaaaggaa

SEQ ID NO: 3115 - DNA, 17 bp, Homo sapiens
ttcctttcgggaatcat

SEQ ID NO: 3116 - DNA, 121 bp, Homo sapiens
agacatcgggaagattctgatgtggaaatggtggaagatgattcccgaaaggaaatgactgcagcttgtaccccccggagaaggatcattaacctcactagtgttttgagtctccaggaag

SEQ ID NO: 3117 - DNA, 121 bp, Homo sapiens
cttcctggagactcaaaacactagtgaggttaatgatccttctccggggggtacaagctgcagtcatttcctttcgggaatcatcttccaccatttccacatcagaatcttcccgatgtct

SEQ ID NO: 3118 - DNA, 17 bp, Homo sapiens
aaatgactgcagcttgt

SEQ ID NO: 3119 - DNA, 17 bp, Homo sapiens
acaagctgcagtcattt

SEQ ID NO: 3120 - DNA, 121 bp, Homo sapiens
cccgaaaggaaatgactgcagcttgtaccccccggagaaggatcattaacctcactagtgttttgagtctccaggaagaaattaatgagcagggacatgagggtacgtaaacgctgtggcc

SEQ ID NO: 3121 - DNA, 121 bp, Homo sapiens
ggccacagcgtttacgtaccctcatgtccctgctcattaatttcttcctggagactcaaaacactagtgaggttaatgatccttctccggggggtacaagctgcagtcatttcctttcggg

SEQ ID NO: 3122 - DNA, 17 bp, Homo sapiens
cactagtgttttgagtc

SEQ ID NO: 3123 - DNA, 17 bp, Homo sapiens
gactcaaaacactagtg

SEQ ID NO: 3124 - DNA, 121 bp, Homo sapiens
gggagatgttgcataaccactccttcgtgggctgtgtgaatcctcagtgggccttggcacagcatcaaaccaagttataccttctcaacaccaccaagcttaggtaaatcagctgagtgtg

SEQ ID NO: 3125 - DNA, 121 bp, Homo sapiens
cacactcagctgatttacctaagcttggtggtgttgagaaggtataacttggtttgatgctgtgccaaggcccactgaggattcacacagcccacgaaggagtggttatgcaacatctccc

SEQ ID NO: 3126 - DNA, 17 bp, Homo sapiens
cttggcacagcatcaaa

SEQ ID NO: 3127 - DNA, 17 bp, Homo sapiens
tttgatgctgtgccaag

SEQ ID NO: 3128 - DNA, 121 bp, Homo sapiens
ccttcgtgggctgtgtgaatcctcagtgggccttggcacagcatcaaaccaagttataccttctcaacaccaccaagcttaggtaaatcagctgagtgtgtgaacaagcagagctactaca

SEQ ID NO: 3129 - DNA, 121 bp, Homo sapiens
tgtagtagctctgcttgttcacacactcagctgatttacctaagcttggtggtgttgagaaggtataacttggtttgatgctgtgccaaggcccactgaggattcacacagcccacgaagg

SEQ ID NO: 3130 - DNA, 17 bp, Homo sapiens
gttataccttctcaaca

SEQ ID NO: 3131 - DNA, 17 bp, Homo sapiens
tgttgagaaggtataac

SEQ ID NO: 3132 - DNA, 121 bp, Homo sapiens
tgggctgtgtgaatcctcagtgggccttggcacagcatcaaaccaagttataccttctcaacaccaccaagcttaggtaaatcagctgagtgtgtgaacaagcagagctactacaacaatg

SEQ ID NO: 3133 - DNA, 121 bp, Homo sapiens
cattgttgtagtagctctgcttgttcacacactcagctgatttacctaagcttggtggtgttgagaaggtataacttggtttgatgctgtgccaaggcccactgaggattcacacagccca

SEQ ID NO: 3134 - DNA, 17 bp, Homo sapiens
ccttctcaacaccacca

SEQ ID NO: 3135 - DNA, 17 bp, Homo sapiens
tggtggtgttgagaagg

SEQ ID NO: 3136 - DNA, 121 bp, Homo sapiens
atgaattcagcttttccttaaagtcacttcatttttattttcagtgaagaactgttctaccagatactcatttatgattttgccaattttggtgttctcaggttatcggtaagtttagatc

SEQ ID NO: 3137 - DNA, 121 bp, Homo sapiens
gatctaaacttaccgataacctgagaacaccaaaattggcaaaatcataaatgagtatctggtagaacagttcttcactgaaaataaaaatgaagtgactttaaggaaaagctgaattcat

SEQ ID NO: 3138 - DNA, 17 bp, Homo sapiens
tgttctaccagatactc

SEQ ID NO: 3139 - DNA, 17 bp, Homo sapiens
gagtatctggtagaaca

SEQ ID NO: 3140 - DNA, 121 bp, Homo sapiens
gcttttccttaaagtcacttcatttttattttcagtgaagaactgttctaccagatactcatttatgattttgccaattttggtgttctcaggttatcggtaagtttagatccttttcact

SEQ ID NO: 3141 - DNA, 121 bp, Homo sapiens
agtgaaaaggatctaaacttaccgataacctgagaacaccaaaattggcaaaatcataaatgagtatctggtagaacagttcttcactgaaaataaaaatgaagtgactttaaggaaaagc

SEQ ID NO: 3142 - DNA, 17 bp, Homo sapiens
agatactcatttatgat

SEQ ID NO: 3143 - DNA, 17 bp, Homo sapiens
atcataaatgagtatct

SEQ ID NO: 3144 - DNA, 121 bp, Homo sapiens
ttttcagtgaagaactgttctaccagatactcatttatgattttgccaattttggtgttctcaggttatcggtaagtttagatccttttcacttctgaaatttcaactgatcgtttctgaa

SEQ ID NO: 3145 - DNA, 121 bp, Homo sapiens
ttcagaaacgatcagttgaaatttcagaagtgaaaaggatctaaacttaccgataacctgagaacaccaaaattggcaaaatcataaatgagtatctggtagaacagttcttcactgaaaa

SEQ ID NO: 3146 - DNA, 17 bp, Homo sapiens
tggtgttctcaggttat

SEQ ID NO: 3147 - DNA, 17 bp, Homo sapiens
ataacctgagaacacca

SEQ ID NO: 3148 - DNA, 121 bp, Homo sapiens
tggatgctccgttaaagcttgctccttcatgttcttgcttcttcctaggagccagcaccgctctttgaccttgccatgcttgccttagatagtccagagagtggctggacagaggaagatg

SEQ ID NO: 3149 - DNA, 121 bp, Homo sapiens
catcttcctctgtccagccactctctggactatctaaggcaagcatggcaaggtcaaagagcggtgctggctcctaggaagaagcaagaacatgaaggagcaagctttaacggagcatcca

SEQ ID NO: 3150 - DNA, 17 bp, Homo sapiens
cagcaccgctctttgac

SEQ ID NO: 3151 - DNA, 17 bp, Homo sapiens
gtcaaagagcggtgctg

SEQ ID NO: 3152 - DNA, 121 bp, Homo sapiens
tgcttgccttagatagtccagagagtggctggacagaggaagatggtcccaaagaaggacttgctgaatacattgttgagtttctgaagaagaaggctgagatgcttgcagactatttctc

SEQ ID NO: 3153 - DNA, 121 bp, Homo sapiens
gagaaatagtctgcaagcatctcagccttcttcttcagaaactcaacaatgtattcagcaagtccttctttgggaccatcttcctctgtccagccactctctggactatctaaggcaagca

SEQ ID NO: 3154 - DNA, 17 bp, Homo sapiens
agaaggacttgctgaat

SEQ ID NO: 3155 - DNA, 17 bp, Homo sapiens
attcagcaagtccttct

SEQ ID NO: 3156 - DNA, 121 bp, Homo sapiens
acagaggaagatggtcccaaagaaggacttgctgaatacattgttgagtttctgaagaagaaggctgagatgcttgcagactatttctctttggaaattgatgaggtgtgacagccattct

SEQ ID NO: 3157 - DNA, 121 bp, Homo sapiens
agaatggctgtcacacctcatcaatttccaaagagaaatagtctgcaagcatctcagccttcttcttcagaaactcaacaatgtattcagcaagtccttctttgggaccatcttcctctgt

SEQ ID NO: 3158 - DNA, 17 bp, Homo sapiens
tgaagaagaaggctgag

SEQ ID NO: 3159 - DNA, 17 bp, Homo sapiens
ctcagccttcttcttca

SEQ ID NO: 3160 - DNA, 121 bp, Homo sapiens
cagaggaagatggtcccaaagaaggacttgctgaatacattgttgagtttctgaagaagaaggctgagatgcttgcagactatttctctttggaaattgatgaggtgtgacagccattctt

SEQ ID NO: 3161 - DNA, 121 bp, Homo sapiens
aagaatggctgtcacacctcatcaatttccaaagagaaatagtctgcaagcatctcagccttcttcttcagaaactcaacaatgtattcagcaagtccttctttgggaccatcttcctctg

SEQ ID NO: 3162 - DNA, 17 bp, Homo sapiens
gaagaagaaggctgaga

SEQ ID NO: 3163 - DNA, 17 bp, Homo sapiens
tctcagccttcttcttc

SEQ ID NO: 3164 - DNA, 121 bp, Homo sapiens
taccccttctgattgacaactatgtgccccctttggagggactgcctatcttcattcttcgactagccactgaggtcagtgatcaagcagatactaagcatttcggtacatgcatgtgtgc

SEQ ID NO: 3165 - DNA, 121 bp, Homo sapiens
gcacacatgcatgtaccgaaatgcttagtatctgcttgatcactgacctcagtggctagtcgaagaatgaagataggcagtccctccaaagggggcacatagttgtcaatcagaaggggta

SEQ ID NO: 3166 - DNA, 17 bp, Homo sapiens
cattcttcgactagcca

SEQ ID NO: 3167 - DNA, 17 bp, Homo sapiens
tggctagtcgaagaatg

SEQ ID NO: 3168 - DNA, 121 bp, Homo sapiens; identical to SEQ ID NO: 3164

SEQ ID NO: 3169 - DNA, 121 bp, Homo sapiens; identical to SEQ ID NO: 3165

SEQ ID NO: 3170 - DNA, 17 bp, Homo sapiens
cattcttcgactagcca

SEQ ID NO: 3171 - DNA, 17 bp, Homo sapiens
tggctagtcgaagaatg

SEQ ID NO: 3172 - DNA, 121 bp, Homo sapiens
ttaccccttctgattgacaactatgtgccccctttggagggactgcctatcttcattcttcgactagccactgaggtcagtgatcaagcagatactaagcatttcggtacatgcatgtgtg

SEQ ID NO: 3173 - DNA, 121 bp, Homo sapiens
cacacatgcatgtaccgaaatgcttagtatctgcttgatcactgacctcagtggctagtcgaagaatgaagataggcagtccctccaaagggggcacatagttgtcaatcagaaggggtaa

SEQ ID NO: 3174 - DNA, 17 bp, Homo sapiens
tcattcttcgactagcc

SEQ ID NO: 3175 - DNA, 17 bp, Homo sapiens
ggctagtcgaagaatga

SEQ ID NO: 3176 - DNA, 121 bp, Homo sapiens
ttggaccaggtgaattgggacgaagaaaaggaatgttttgaaagcctcagtaaagaatgcgctatgttctattccatccggaagcagtacatatctgaggagtcgaccctctcaggccagc

SEQ ID NO: 3177 - DNA, 121 bp, Homo sapiens
gctggcctgagagggtcgactcctcagatatgtactgcttccggatggaatagaacatagcgcattctttactgaggctttcaaaacattccttttcttcgtcccaattcacctggtccaa

SEQ ID NO: 3178 - DNA, 17 bp, Homo sapiens
aagaatgcgctatgttc

SEQ ID NO: 3179 - DNA, 17 bp, Homo sapiens
gaacatagcgcattctt

SEQ ID NO: 3180 - DNA, 121 bp, Homo sapiens
aggcttatgacatctaatgtgttttccagagtgaagtgcctggctccattccaaactcctggaagtggactgtggaacacattgtctataaagccttgcgctcacacattctgcctcctaa

SEQ ID NO: 3181 - DNA, 121 bp, Homo sapiens
ttaggaggcagaatgtgtgagcgcaaggctttatagacaatgtgttccacagtccacttccaggagtttggaatggagccaggcacttcactctggaaaacacattagatgtcataagcct

SEQ ID NO: 3182 - DNA, 17 bp, Homo sapiens
aaactcctggaagtgga

SEQ ID NO: 3183 - DNA, 17 bp, Homo sapiens
tccacttccaggagttt

SEQ ID NO: 3184 - DNA, 121 bp, Homo sapiens
atgacatctaatgtgttttccagagtgaagtgcctggctccattccaaactcctggaagtggactgtggaacacattgtctataaagccttgcgctcacacattctgcctcctaaacattt

SEQ ID NO: 3185 - DNA, 121 bp, Homo sapiens
aaatgtttaggaggcagaatgtgtgagcgcaaggctttatagacaatgtgttccacagtccacttccaggagtttggaatggagccaggcacttcactctggaaaacacattagatgtcat

SEQ ID NO: 3186 - DNA, 17 bp, Homo sapiens
ctggaagtggactgtgg

SEQ ID NO: 3187 - DNA, 17 bp, Homo sapiens
ccacagtccacttccag

SEQ ID NO: 3188 - DNA, 121 bp, Homo sapiens
tgacatctaatgtgttttccagagtgaagtgcctggctccattccaaactcctggaagtggactgtggaacacattgtctataaagccttgcgctcacacattctgcctcctaaacatttc

SEQ ID NO: 3189 - DNA, 121 bp, Homo sapiens
gaaatgtttaggaggcagaatgtgtgagcgcaaggctttatagacaatgtgttccacagtccacttccaggagtttggaatggagccaggcacttcactctggaaaacacattagatgtca

SEQ ID NO: 3190 - DNA, 17 bp, Homo sapiens
tggaagtggactgtgga

SEQ ID NO: 3191 - DNA, 17 bp, Homo sapiens
tccacagtccacttcca

SEQ ID NO: 3192 - DNA, 121 bp, Homo sapiens
atctaatgtgttttccagagtgaagtgcctggctccattccaaactcctggaagtggactgtggaacacattgtctataaagccttgcgctcacacattctgcctcctaaacatttcacag

SEQ ID NO: 3193 - DNA, 121 bp, Homo sapiens
ctgtgaaatgtttaggaggcagaatgtgtgagcgcaaggctttatagacaatgtgttccacagtccacttccaggagtttggaatggagccaggcacttcactctggaaaacacattagat

SEQ ID NO: 3194 - DNA, 17 bp, Homo sapiens
agtggactgtggaacac

SEQ ID NO: 3195 - DNA, 17 bp, Homo sapiens
gtgttccacagtccact

SEQ ID NO: 3196 - DNA, 121 bp, Homo sapiens
gagtgaagtgcctggctccattccaaactcctggaagtggactgtggaacacattgtctataaagccttgcgctcacacattctgcctcctaaacatttcacagaagatggaaatatcctg

SEQ ID NO: 3197 - DNA, 121 bp, Homo sapiens
caggatatttccatcttctgtgaaatgtttaggaggcagaatgtgtgagcgcaaggctttatagacaatgtgttccacagtccacttccaggagtttggaatggagccaggcacttcactc

SEQ ID NO: 3198 - DNA, 17 bp, Homo sapiens
attgtctataaagcctt

SEQ ID NO: 3199 - DNA, 17 bp, Homo sapiens
aaggctttatagacaat

SEQ ID NO: 3200 - DNA, 121 bp, Homo sapiens
ctaaacatttcacagaagatggaaatatcctgcagcttgctaacctgcctgatctatacaaagtctttgagaggtgttaaatatggttatttatgcactgtgggatgtgttcttctttctc

SEQ ID NO: 3201 - DNA, 121 bp, Homo sapiens
gagaaagaagaacacatcccacagtgcataaataaccatatttaacacctctcaaagactttgtatagatcaggcaggttagcaagctgcaggatatttccatcttctgtgaaatgtttag

SEQ ID NO: 3202 - DNA, 17 bp, Homo sapiens
tctatacaaagtctttg

SEQ ID NO: 3203 - DNA, 17 bp, Homo sapiens
caaagactttgtataga

SEQ ID NO: 3204 - DNA, 121 bp, Homo sapiens
acagaagatggaaatatcctgcagcttgctaacctgcctgatctatacaaagtctttgagaggtgttaaatatggttatttatgcactgtgggatgtgttcttctttctctgtattccgat

SEQ ID NO: 3205 - DNA, 121 bp, Homo sapiens
atcggaatacagagaaagaagaacacatcccacagtgcataaataaccatatttaacacctctcaaagactttgtatagatcaggcaggttagcaagctgcaggatatttccatcttctgt

SEQ ID NO: 3206 - DNA, 17 bp, Homo sapiens
tctttgagaggtgttaa

SEQ ID NO: 3207 - DNA, 17 bp, Homo sapiens
ttaacacctctcaaaga

SEQ ID NO: 3208 - DNA, 121 bp, Homo sapiens
ttttccacaaaagacatttatcaggacctcaaccggttgttgaaaggcaaaaagggagagcagatgaatagtgctgtattgccagaaatggagaatcaggtacatggattataaatgtgaa

SEQ ID NO: 3209 - DNA, 121 bp, Homo sapiens
ttcacatttataatccatgtacctgattctccatttctggcaatacagcactattcatctgctctccctttttgcctttcaacaaccggttgaggtcctgataaatgtcttttgtggaaaa

SEQ ID NO: 3210 - DNA, 17 bp, Homo sapiens
agggagagcagatgaat

SEQ ID NO: 3211 - DNA, 17 bp, Homo sapiens
attcatctgctctccct

SEQ ID NO: 3212 - DNA, 121 bp, Homo sapiens
tcatcactgtctgcggtaatcaagtttttagaactcttatcagatgattccaactttggacagtttgaactgactacttttgacttcagccagtatatgaaattggatattgcagcagtca

SEQ ID NO: 3213 - DNA, 121 bp, Homo sapiens
tgactgctgcaatatccaatttcatatactggctgaagtcaaaagtagtcagttcaaactgtccaaagttggaatcatctgataagagttctaaaaacttgattaccgcagacagtgatga

SEQ ID NO: 3214 - DNA, 17 bp, Homo sapiens
actttggacagtttgaa

SEQ ID NO: 3215 - DNA, 17 bp, Homo sapiens
ttcaaactgtccaaagt

SEQ ID NO: 3216 - DNA, 121 bp, Homo sapiens
aactttggacagtttgaactgactacttttgacttcagccagtatatgaaattggatattgcagcagtcagagcccttaacctttttcaggtaaaaaaaaaaaaaaaaaaaaaaaaaaagg

SEQ ID NO: 3217 - DNA, 121 bp, Homo sapiens
cctttttttttttttttttttttttttttacctgaaaaaggttaagggctctgactgctgcaatatccaatttcatatactggctgaagtcaaaagtagtcagttcaaactgtccaaagtt

SEQ ID NO: 3218 - DNA, 17 bp, Homo sapiens
tggatattgcagcagtc

SEQ ID NO: 3219 - DNA, 17 bp, Homo sapiens
gactgctgcaatatcca

SEQ ID NO: 3220 - DNA, 121 bp, Homo sapiens
agcttgccattctttctattttattttttgtttactagggttctgttgaagataccactggctctcagtctctggctgccttgctgaataagtgtaaaacccctcaaggacaaagacttgt

SEQ ID NO: 3221 - DNA, 121 bp, Homo sapiens
acaagtctttgtccttgaggggttttacacttattcagcaaggcagccagagactgagagccagtggtatcttcaacagaaccctagtaaacaaaaaataaaatagaaagaatggcaagct

SEQ ID NO: 3222 - DNA, 17 bp, Homo sapiens
taccactggctctcagt

SEQ ID NO: 3223 - DNA, 17 bp, Homo sapiens
actgagagccagtggta

SEQ ID NO: 3224 - DNA, 121 bp, Homo sapiens
ttgccattctttctattttattttttgtttactagggttctgttgaagataccactggctctcagtctctggctgccttgctgaataagtgtaaaacccctcaaggacaaagacttgttaa

SEQ ID NO: 3225 - DNA, 121 bp, Homo sapiens
ttaacaagtctttgtccttgaggggttttacacttattcagcaaggcagccagagactgagagccagtggtatcttcaacagaaccctagtaaacaaaaaataaaatagaaagaatggcaa

SEQ ID NO: 3226 - DNA, 17 bp, Homo sapiens
cactggctctcagtctc

SEQ ID NO: 3227 - DNA, 17 bp, Homo sapiens
gagactgagagccagtg

SEQ ID NO: 3228 - DNA, 121 bp, Homo sapiens
gtggaagcttttgtagaagatgcagaattgaggcagactttacaagaagatttacttcgtcgattcccagatcttaaccgacttgccaagaagtttcaaagacaagcagcaaacttacaag

SEQ ID NO: 3229 - DNA, 121 bp, Homo sapiens
cttgtaagtttgctgcttgtctttgaaacttcttggcaagtcggttaagatctgggaatcgacgaagtaaatcttcttgtaaagtctgcctcaattctgcatcttctacaaaagcttccac

SEQ ID NO: 3230 - DNA, 17 bp, Homo sapiens
tacttcgtcgattccca

SEQ ID NO: 3231 - DNA, 17 bp, Homo sapiens
tgggaatcgacgaagta

SEQ ID NO: 3232 - DNA, 121 bp, Homo sapiens
caagaagatttacttcgtcgattcccagatcttaaccgacttgccaagaagtttcaaagacaagcagcaaacttacaagattgttaccgactctatcagggtataaatcaactacctaatg

SEQ ID NO: 3233 - DNA, 121 bp, Homo sapiens
cattaggtagttgatttataccctgatagagtcggtaacaatcttgtaagtttgctgcttgtctttgaaacttcttggcaagtcggttaagatctgggaatcgacgaagtaaatcttcttg

SEQ ID NO: 3234 - DNA, 17 bp, Homo sapiens
ttcaaagacaagcagca

SEQ ID NO: 3235 - DNA, 17 bp, Homo sapiens
tgctgcttgtctttgaa

SEQ ID NO: 3236 - DNA, 121 bp, Homo sapiens
gatcttaaccgacttgccaagaagtttcaaagacaagcagcaaacttacaagattgttaccgactctatcagggtataaatcaactacctaatgttatacaggctctggaaaaacatgaag

SEQ ID NO: 3237 - DNA, 121 bp, Homo sapiens
cttcatgtttttccagagcctgtataacattaggtagttgatttataccctgatagagtcggtaacaatcttgtaagtttgctgcttgtctttgaaacttcttggcaagtcggttaagatc

SEQ ID NO: 3238 - DNA, 17 bp, Homo sapiens
attgttaccgactctat

SEQ ID NO: 3239 - DNA, 17 bp, Homo sapiens
atagagtcggtaacaat

SEQ ID NO: 3240 - DNA, 121 bp, Homo sapiens
gcaaacttacaagattgttaccgactctatcagggtataaatcaactacctaatgttatacaggctctggaaaaacatgaaggtaacaagtgattttgtttttttgttttccttcaactca

SEQ ID NO: 3241 - DNA, 121 bp, Homo sapiens
tgagttgaaggaaaacaaaaaaacaaaatcacttgttaccttcatgtttttccagagcctgtataacattaggtagttgatttataccctgatagagtcggtaacaatcttgtaagtttgc

SEQ ID NO: 3242 - DNA, 17 bp, Homo sapiens
atgttatacaggctctg

SEQ ID NO: 3243 - DNA, 17 bp, Homo sapiens
cagagcctgtataacat

SEQ ID NO: 3244 - DNA, 121 bp, Homo sapiens
tattctgtaaaatgagatctttttatttgtttgttttactactttcttttaggaaaacaccagaaattattgttggcagtttttgtgactcctcttactgatcttcgttctgacttctcca

SEQ ID NO: 3245 - DNA, 121 bp, Homo sapiens
tggagaagtcagaacgaagatcagtaagaggagtcacaaaaactgccaacaataatttctggtgttttcctaaaagaaagtagtaaaacaaacaaataaaaagatctcattttacagaata

SEQ ID NO: 3246 - DNA, 17 bp, Homo sapiens
gaaaacaccagaaatta

SEQ ID NO: 3247 - DNA, 17 bp, Homo sapiens
taatttctggtgttttc

SEQ ID NO: 3248 - DNA, 121 bp, Homo sapiens
ctcctcttactgatcttcgttctgacttctccaagtttcaggaaatgatagaaacaactttagatatggatcaggtatgcaatatactttttaatttaagcagtagttatttttaaaaagc

SEQ ID NO: 3249 - DNA, 121 bp, Homo sapiens
gctttttaaaaataactactgcttaaattaaaaagtatattgcatacctgatccatatctaaagttgtttctatcatttcctgaaacttggagaagtcagaacgaagatcagtaagaggag

SEQ ID NO: 3250 - DNA, 17 bp, Homo sapiens
aacaactttagatatgg

SEQ ID NO: 3251 - DNA, 17 bp, Homo sapiens
ccatatctaaagttgtt

SEQ ID NO: 3252 - DNA, 121 bp, Homo sapiens
tttcttcttgattatcaaggcttggaccctggcaaacagattaaactggattccagtgcacagtttggatattactttcgtgtaacctgtaaggaagaaaaagtccttcgtaacaataaaa

SEQ ID NO: 3253 - DNA, 121 bp, Homo sapiens
ttttattgttacgaaggactttttcttccttacaggttacacgaaagtaatatccaaactgtgcactggaatccagtttaatctgtttgccagggtccaagccttgataatcaagaagaaa

SEQ ID NO: 3254 - DNA, 17 bp, Homo sapiens
ccagtgcacagtttgga

SEQ ID NO: 3255 - DNA, 17 bp, Homo sapiens
tccaaactgtgcactgg

SEQ ID NO: 3256 - DNA, 121 bp, Homo sapiens
gcttggaccctggcaaacagattaaactggattccagtgcacagtttggatattactttcgtgtaacctgtaaggaagaaaaagtccttcgtaacaataaaaactttagtactgtagatat

SEQ ID NO: 3257 - DNA, 121 bp, Homo sapiens
atatctacagtactaaagtttttattgttacgaaggactttttcttccttacaggttacacgaaagtaatatccaaactgtgcactggaatccagtttaatctgtttgccagggtccaagc

SEQ ID NO: 3258 - DNA, 17 bp, Homo sapiens
ttactttcgtgtaacct

SEQ ID NO: 3259 - DNA, 17 bp, Homo sapiens
aggttacacgaaagtaa

SEQ ID NO: 3260 - DNA, 121 bp, Homo sapiens
ttaatatttttaataaaactgttatttcgatttgcagcaaattgacttctttaaatgaagagtataccaaaaataaaacagaatatgaagaagcccaggatgccattgttaaagaaattgt

SEQ ID NO: 3261 - DNA, 121 bp, Homo sapiens
acaatttctttaacaatggcatcctgggcttcttcatattctgttttatttttggtatactcttcatttaaagaagtcaatttgctgcaaatcgaaataacagttttattaaaaatattaa

SEQ ID NO: 3262 - DNA, 17 bp, Homo sapiens
aaatgaagagtatacca

SEQ ID NO: 3263 - DNA, 17 bp, Homo sapiens
tggtatactcttcattt

SEQ ID NO: 3264 - DNA, 121 bp, Homo sapiens
aatgaagagtataccaaaaataaaacagaatatgaagaagcccaggatgccattgttaaagaaattgtcaatatttcttcaggtaaacttaatagaactaataatgttctgaatgtcacct

SEQ ID NO: 3265 - DNA, 121 bp, Homo sapiens
aggtgacattcagaacattattagttctattaagtttacctgaagaaatattgacaatttctttaacaatggcatcctgggcttcttcatattctgttttatttttggtatactcttcatt

SEQ ID NO: 3266 - DNA, 17 bp, Homo sapiens
ttgttaaagaaattgtc

SEQ ID NO: 3267 - DNA, 17 bp, Homo sapiens
gacaatttctttaacaa

SEQ ID NO: 3268 - DNA, 121 bp, Homo sapiens
tgtttttatttttatacaggctatgtagaaccaatgcagacactcaatgatgtgttagctcagctagatgctgttgtcagctttgctcacgtgtcaaatggagcacctgttccatatgtac

SEQ ID NO: 3269 - DNA, 121 bp, Homo sapiens
gtacatatggaacaggtgctccatttgacacgtgagcaaagctgacaacagcatctagctgagctaacacatcattgagtgtctgcattggttctacatagcctgtataaaaataaaaaca

SEQ ID NO: 3270 - DNA, 17 bp, Homo sapiens
tgttagctcagctagat

SEQ ID NO: 3271 - DNA, 17 bp, Homo sapiens
atctagctgagctaaca

SEQ ID NO: 3272 - DNA, 121 bp, Homo sapiens
agctcagctagatgctgttgtcagctttgctcacgtgtcaaatggagcacctgttccatatgtacgaccagccattttggagaaaggacaaggaagaattatattaaaagcatccaggcat

SEQ ID NO: 3273 - DNA, 121 bp, Homo sapiens
atgcctggatgcttttaatataattcttccttgtcctttctccaaaatggctggtcgtacatatggaacaggtgctccatttgacacgtgagcaaagctgacaacagcatctagctgagct

SEQ ID NO: 3274 - DNA, 17 bp, Homo sapiens
gttccatatgtacgacc

SEQ ID NO: 3275 - DNA, 17 bp, Homo sapiens
ggtcgtacatatggaac

SEQ ID NO: 3276 - DNA, 121 bp, Homo sapiens
cagctagatgctgttgtcagctttgctcacgtgtcaaatggagcacctgttccatatgtacgaccagccattttggagaaaggacaaggaagaattatattaaaagcatccaggcatgctt

SEQ ID NO: 3277 - DNA, 121 bp, Homo sapiens
aagcatgcctggatgcttttaatataattcttccttgtcctttctccaaaatggctggtcgtacatatggaacaggtgctccatttgacacgtgagcaaagctgacaacagcatctagctg

SEQ ID NO: 3278 - DNA, 17 bp, Homo sapiens
catatgtacgaccagcc

SEQ ID NO: 3279 - DNA, 17 bp, Homo sapiens
ggctggtcgtacatatg

SEQ ID NO: 3280 - DNA, 121 bp, Homo sapiens
tagatgctgttgtcagctttgctcacgtgtcaaatggagcacctgttccatatgtacgaccagccattttggagaaaggacaaggaagaattatattaaaagcatccaggcatgcttgtgt

SEQ ID NO: 3281 - DNA, 121 bp, Homo sapiens
acacaagcatgcctggatgcttttaatataattcttccttgtcctttctccaaaatggctggtcgtacatatggaacaggtgctccatttgacacgtgagcaaagctgacaacagcatcta

SEQ ID NO: 3282 - DNA, 17 bp, Homo sapiens
tgtacgaccagccattt

SEQ ID NO: 3283 - DNA, 17 bp, Homo sapiens
aaatggctggtcgtaca

SEQ ID NO: 3284 - DNA, 121 bp, Homo sapiens
cctgttccatatgtacgaccagccattttggagaaaggacaaggaagaattatattaaaagcatccaggcatgcttgtgttgaagttcaagatgaaattgcatttattcctaatgacgtat

SEQ ID NO: 3285 - DNA, 121 bp, Homo sapiens
atacgtcattaggaataaatgcaatttcatcttgaacttcaacacaagcatgcctggatgcttttaatataattcttccttgtcctttctccaaaatggctggtcgtacatatggaacagg

SEQ ID NO: 3286 - DNA, 17 bp, Homo sapiens
tattaaaagcatccagg

SEQ ID NO: 3287 - DNA, 17 bp, Homo sapiens
cctggatgcttttaata

SEQ ID NO: 3288 - DNA, 121 bp, Homo sapiens
atgtacgaccagccattttggagaaaggacaaggaagaattatattaaaagcatccaggcatgcttgtgttgaagttcaagatgaaattgcatttattcctaatgacgtatactttgaaaa

SEQ ID NO: 3289 - DNA, 121 bp, Homo sapiens
ttttcaaagtatacgtcattaggaataaatgcaatttcatcttgaacttcaacacaagcatgcctggatgcttttaatataattcttccttgtcctttctccaaaatggctggtcgtacat

SEQ ID NO: 3290 - DNA, 17 bp, Homo sapiens
atccaggcatgcttgtg

SEQ ID NO: 3291 - DNA, 17 bp, Homo sapiens
cacaagcatgcctggat

SEQ ID NO: 3292 - DNA, 121 bp, Homo sapiens
tatgtacgaccagccattttggagaaaggacaaggaagaattatattaaaagcatccaggcatgcttgtgttgaagttcaagatgaaattgcatttattcctaatgacgtatactttgaaa

SEQ ID NO: 3293 - DNA, 121 bp, Homo sapiens
tttcaaagtatacgtcattaggaataaatgcaatttcatcttgaacttcaacacaagcatgcctggatgcttttaatataattcttccttgtcctttctccaaaatggctggtcgtacata

SEQ ID NO: 3294 - DNA, 17 bp, Homo sapiens
catccaggcatgcttgt

SEQ ID NO: 3295 - DNA, 17 bp, Homo sapiens
acaagcatgcctggatg

SEQ ID NO: 3296 - DNA, 121 bp, Homo sapiens
aaaggacaaggaagaattatattaaaagcatccaggcatgcttgtgttgaagttcaagatgaaattgcatttattcctaatgacgtatactttgaaaaagataaacagatgttccacatca

SEQ ID NO: 3297 - DNA, 121 bp, Homo sapiens
tgatgtggaacatctgtttatctttttcaaagtatacgtcattaggaataaatgcaatttcatcttgaacttcaacacaagcatgcctggatgcttttaatataattcttccttgtccttt

SEQ ID NO: 3298 - DNA, 17 bp, Homo sapiens
ttcaagatgaaattgca

SEQ ID NO: 3299 - DNA, 17 bp, Homo sapiens
tgcaatttcatcttgaa

SEQ ID NO: 3300 - DNA, 121 bp, Homo sapiens
atccaggcatgcttgtgttgaagttcaagatgaaattgcatttattcctaatgacgtatactttgaaaaagataaacagatgttccacatcattactggtaaaaaacctggtttttgggct

SEQ ID NO: 3301 - DNA, 121 bp, Homo sapiens
agcccaaaaaccaggttttttaccagtaatgatgtggaacatctgtttatctttttcaaagtatacgtcattaggaataaatgcaatttcatcttgaacttcaacacaagcatgcctggat

SEQ ID NO: 3302 - DNA, 17 bp, Homo sapiens
gacgtatactttgaaaa

SEQ ID NO: 3303 - DNA, 17 bp, Homo sapiens
ttttcaaagtatacgtc

SEQ ID NO: 3304 - DNA, 121 bp, Homo sapiens
gaaagaagtttaaaatcttgctttctgatataatttgttttgtaggccccaatatgggaggtaaatcaacatatattcgacaaactggggtgatagtactcatggcccaaattgggtgttt

SEQ ID NO: 3305 - DNA, 121 bp, Homo sapiens
aaacacccaatttgggccatgagtactatcaccccagtttgtcgaatatatgttgatttacctcccatattggggcctacaaaacaaattatatcagaaagcaagattttaaacttctttc

SEQ ID NO: 3306 - DNA, 17 bp, Homo sapiens
tatgggaggtaaatcaa

SEQ ID NO: 3307 - DNA, 17 bp, Homo sapiens
ttgatttacctcccata

SEQ ID NO: 3308 - DNA, 121 bp, Homo sapiens
ttgctttctgatataatttgttttgtaggccccaatatgggaggtaaatcaacatatattcgacaaactggggtgatagtactcatggcccaaattgggtgttttgtgccatgtgagtcag

SEQ ID NO: 3309 - DNA, 121 bp, Homo sapiens
ctgactcacatggcacaaaacacccaatttgggccatgagtactatcaccccagtttgtcgaatatatgttgatttacctcccatattggggcctacaaaacaaattatatcagaaagcaa

SEQ ID NO: 3310 - DNA, 17 bp, Homo sapiens
catatattcgacaaact

SEQ ID NO: 3311 - DNA, 17 bp, Homo sapiens
agtttgtcgaatatatg

SEQ ID NO: 3312 - DNA, 121 bp, Homo sapiens
atgggaggtaaatcaacatatattcgacaaactggggtgatagtactcatggcccaaattgggtgttttgtgccatgtgagtcagcagaagtgtccattgtggactgcatcttagcccgag

SEQ ID NO: 3313 - DNA, 121 bp, Homo sapiens
ctcgggctaagatgcagtccacaatggacacttctgctgactcacatggcacaaaacacccaatttgggccatgagtactatcaccccagtttgtcgaatatatgttgatttacctcccat

SEQ ID NO: 3314 - DNA, 17 bp, Homo sapiens
cccaaattgggtgtttt

SEQ ID NO: 3315 - DNA, 17 bp, Homo sapiens
aaaacacccaatttggg

SEQ ID NO: 3316 - DNA, 121 bp, Homo sapiens
acatatattcgacaaactggggtgatagtactcatggcccaaattgggtgttttgtgccatgtgagtcagcagaagtgtccattgtggactgcatcttagcccgagtaggggctggtgaca

SEQ ID NO: 3317 - DNA, 121 bp, Homo sapiens
tgtcaccagcccctactcgggctaagatgcagtccacaatggacacttctgctgactcacatggcacaaaacacccaatttgggccatgagtactatcaccccagtttgtcgaatatatgt

SEQ ID NO: 3318 - DNA, 17 bp, Homo sapiens
ttgtgccatgtgagtca

SEQ ID NO: 3319 - DNA, 17 bp, Homo sapiens
tgactcacatggcacaa

SEQ ID NO: 3320 - DNA, 121 bp, Homo sapiens
catatattcgacaaactggggtgatagtactcatggcccaaattgggtgttttgtgccatgtgagtcagcagaagtgtccattgtggactgcatcttagcccgagtaggggctggtgacag

SEQ ID NO: 3321 - DNA, 121 bp, Homo sapiens
ctgtcaccagcccctactcgggctaagatgcagtccacaatggacacttctgctgactcacatggcacaaaacacccaatttgggccatgagtactatcaccccagtttgtcgaatatatg

SEQ ID NO: 3322 - DNA, 17 bp, Homo sapiens
tgtgccatgtgagtcag

SEQ ID NO: 3323 - DNA, 17 bp, Homo sapiens
ctgactcacatggcaca

SEQ ID NO: 3324 - DNA, 121 bp, Homo sapiens
gagtcagcagaagtgtccattgtggactgcatcttagcccgagtaggggctggtgacagtcaattgaaaggagtctccacgttcatggctgaaatgttggaaactgcttctatcctcaggt

SEQ ID NO: 3325 - DNA, 121 bp, Homo sapiens
acctgaggatagaagcagtttccaacatttcagccatgaacgtggagactcctttcaattgactgtcaccagcccctactcgggctaagatgcagtccacaatggacacttctgctgactc

SEQ ID NO: 3326 - DNA, 17 bp, Homo sapiens
gtgacagtcaattgaaa

SEQ ID NO: 3327 - DNA, 17 bp, Homo sapiens
tttcaattgactgtcac

SEQ ID NO: 3328 - DNA, 121 bp, Homo sapiens
ccaatcagataccaactgttaataatctacatgtcacagcactcaccactgaagagaccttaactatgctttatcaggtgaagaaaggtatgtactattggagtactctaaattcagaact

SEQ ID NO: 3329 - DNA, 121 bp, Homo sapiens
agttctgaatttagagtactccaatagtacatacctttcttcacctgataaagcatagttaaggtctcttcagtggtgagtgctgtgacatgtagattattaacagttggtatctgattgg

SEQ ID NO: 3330 - DNA, 17 bp, Homo sapiens
agagaccttaactatgc

SEQ ID NO: 3331 - DNA, 17 bp, Homo sapiens
gcatagttaaggtctct

SEQ ID NO: 3332 - DNA, 121 bp, Homo sapiens
ttccccaaatttcttataggtgtctgtgatcaaagttttgggattcatgttgcagagcttgctaatttccctaagcatgtaatagagtgtgctaaacagaaagccctggaacttgaggagt

SEQ ID NO: 3333 - DNA, 121 bp, Homo sapiens
actcctcaagttccagggctttctgtttagcacactctattacatgcttagggaaattagcaagctctgcaacatgaatcccaaaactttgatcacagacacctataagaaatttggggaa

SEQ ID NO: 3334 - DNA, 17 bp, Homo sapiens
cagagcttgctaatttc

SEQ ID NO: 3335 - DNA, 17 bp, Homo sapiens
gaaattagcaagctctg

SEQ ID NO: 3336 - DNA, 121 bp, Homo sapiens
atagagtgtgctaaacagaaagccctggaacttgaggagtttcagtatattggagaatcgcaaggatatgatatcatggaaccagcagcaaagaagtgctatctggaaagagaggtttgtc

SEQ ID NO: 3337 - DNA, 121 bp, Homo sapiens
gacaaacctctctttccagatagcacttctttgctgctggttccatgatatcatatccttgcgattctccaatatactgaaactcctcaagttccagggctttctgtttagcacactctat

SEQ ID NO: 3338 - DNA, 17 bp, Homo sapiens
gagaatcgcaaggatat

SEQ ID NO: 3339 - DNA, 17 bp, Homo sapiens
atatccttgcgattctc

SEQ ID NO: 3340 - DNA, 121 bp, Homo sapiens
aggagttcctgtccaaggtgaaacaaatgccctttactgaaatgtcagaagaaaacatcacaataaagttaaaacagctaaaagctgaagtaatagcaaagaataatagctttgtaaatga

SEQ ID NO: 3341 - DNA, 121 bp, Homo sapiens
tcatttacaaagctattattctttgctattacttcagcttttagctgttttaactttattgtgatgttttcttctgacatttcagtaaagggcatttgtttcaccttggacaggaactcct

SEQ ID NO: 3342 - DNA, 17 bp, Homo sapiens
aaacatcacaataaagt

SEQ ID NO: 3343 - DNA, 17 bp, Homo sapiens
actttattgtgatgttt

SEQ ID NO: 3344 - DNA, 121 bp, Homo sapiens
ggaaatcagtccgtgttcatgtacagttttttgatgacagcccaacaaggggctgggttagcaaaaggcttttaaagccatatacaggtaagagtcactactgccatgtgtgtgtgtttgt

SEQ ID NO: 3345 - DNA, 121 bp, Homo sapiens
acaaacacacacacatggcagtagtgactcttacctgtatatggctttaaaagccttttgctaacccagccccttgttgggctgtcatcaaaaaactgtacatgaacacggactgatttcc

SEQ ID NO: 3346 - DNA, 17 bp, Homo sapiens
ctgggttagcaaaaggc

SEQ ID NO: 3347 - DNA, 17 bp, Homo sapiens
gccttttgctaacccag

SEQ ID NO: 3348 - DNA, 121 bp, Homo sapiens
cgtgagcctctgcacccggcccttattgtttataaatacatttctttctaggttcaaaatcaaaggaagcccagaagggaggtcatttttacagtgcaaagcctgaaatactgagagcaat

SEQ ID NO: 3349 - DNA, 121 bp, Homo sapiens
attgctctcagtatttcaggctttgcactgtaaaaatgacctcccttctgggcttcctttgattttgaacctagaaagaaatgtatttataaacaataagggccgggtgcagaggctcacg

SEQ ID NO: 3350 - DNA, 17 bp, Homo sapiens
ttcaaaatcaaaggaag

SEQ ID NO: 3351 - DNA, 17 bp, Homo sapiens
cttcctttgattttgaa

SEQ ID NO: 3352 - DNA, 121 bp, Homo sapiens
ttccaaattttgatttgtttttaaatactctttccttgcctggcaggtaggcacaacttacgtaacagataagagtgaagaagataatgaaattgagagtgaagaggaagtacagcctaag

SEQ ID NO: 3353 - DNA, 121 bp, Homo sapiens
cttaggctgtacttcctcttcactctcaatttcattatcttcttcactcttatctgttacgtaagttgtgcctacctgccaggcaaggaaagagtatttaaaaacaaatcaaaatttggaa

SEQ ID NO: 3354 - DNA, 17 bp, Homo sapiens
acaacttacgtaacaga

SEQ ID NO: 3355 - DNA, 17 bp, Homo sapiens
tctgttacgtaagttgt

SEQ ID NO: 3356 - DNA, 121 bp, Homo sapiens
gaagaggaagtacagcctaagacacaaggatctaggcgaagtagccgccaaataaaaaaacgaagggtcatatcagattctgagagtgacattggtggctctgatgtggaatttaagccag

SEQ ID NO: 3357 - DNA, 121 bp, Homo sapiens
ctggcttaaattccacatcagagccaccaatgtcactctcagaatctgatatgacccttcgtttttttatttggcggctacttcgcctagatccttgtgtcttaggctgtacttcctcttc

SEQ ID NO: 3358 - DNA, 17 bp, Homo sapiens
taaaaaaacgaagggtc

SEQ ID NO: 3359 - DNA, 17 bp, Homo sapiens
gacccttcgttttttta

SEQ ID NO: 3360 - DNA, 121 bp, Homo sapiens
ttaagccagacactaaggaggaaggaagcagtgatgaaataagcagtggagtgggggatagtgagagtgaaggcctgaacagccctgtcaaagttgctcgaaagcggaagagaatggtgac

SEQ ID NO: 3361 - DNA, 121 bp, Homo sapiens
gtcaccattctcttccgctttcgagcaactttgacagggctgttcaggccttcactctcactatcccccactccactgcttatttcatcactgcttccttcctccttagtgtctggcttaa

SEQ ID NO: 3362 - DNA, 17 bp, Homo sapiens
gggggatagtgagagtg

SEQ ID NO: 3363 - DNA, 17 bp, Homo sapiens
cactctcactatccccc

SEQ ID NO: 3364 - DNA, 121 bp, Homo sapiens
gaggaagattcttctggccatactcgtgcatatggtgtgtgctttgttgatacttcactgggaaagtttttcataggtcagttttcagatgatcgccattgttcgagatttaggactctag

SEQ ID NO: 3365 - DNA, 121 bp, Homo sapiens
ctagagtcctaaatctcgaacaatggcgatcatctgaaaactgacctatgaaaaactttcccagtgaagtatcaacaaagcacacaccatatgcacgagtatggccagaagaatcttcctc

SEQ ID NO: 3366 - DNA, 17 bp, Homo sapiens
cttcactgggaaagttt

SEQ ID NO: 3367 - DNA, 17 bp, Homo sapiens
aaactttcccagtgaag

SEQ ID NO: 3368 - DNA, 121 bp, Homo sapiens
gaattggccctctctgctctaggtggttgtgtcttctacctcaaaaaatgccttattgatcaggagcttttatcaatggctaattttgaagaatatattcccttggattctgacacagtca

SEQ ID NO: 3369 - DNA, 121 bp, Homo sapiens
tgactgtgtcagaatccaagggaatatattcttcaaaattagccattgataaaagctcctgatcaataaggcattttttgaggtagaagacacaaccacctagagcagagagggccaattc

SEQ ID NO: 3370 - DNA, 17 bp, Homo sapiens
ttattgatcaggagctt

SEQ ID NO: 3371 - DNA, 17 bp, Homo sapiens
aagctcctgatcaataa

SEQ ID NO: 3372 - DNA, 121 bp, Homo sapiens
cccttggattctgacacagtcagcactacaagatctggtgctatcttcaccaaagcctatcaacgaatggtgctagatgcagtgacattaaacaacttggagatttttctgaatggaacaa

SEQ ID NO: 3373 - DNA, 121 bp, Homo sapiens
ttgttccattcagaaaaatctccaagttgtttaatgtcactgcatctagcaccattcgttgataggctttggtgaagatagcaccagatcttgtagtgctgactgtgtcagaatccaaggg

SEQ ID NO: 3374 - DNA, 17 bp, Homo sapiens
aagcctatcaacgaatg

SEQ ID NO: 3375 - DNA, 17 bp, Homo sapiens
cattcgttgataggctt

SEQ ID NO: 3376 - DNA, 121 bp, Homo sapiens
gccccactctgtaaccattatgctattaatgatcgtctagatgccatagaagacctcatggttgtgcctgacaaaatctccgaagttgtagagcttctaaagaagcttccagatcttgaga

SEQ ID NO: 3377 - DNA, 121 bp, Homo sapiens
tctcaagatctggaagcttctttagaagctctacaacttcggagattttgtcaggcacaaccatgaggtcttctatggcatctagacgatcattaatagcataatggttacagagtggggc

SEQ ID NO: 3378 - DNA, 17 bp, Homo sapiens
acctcatggttgtgcct

SEQ ID NO: 3379 - DNA, 17 bp, Homo sapiens
aggcacaaccatgaggt

SEQ ID NO: 3380 - DNA, 121 bp, Homo sapiens
gtaaccattatgctattaatgatcgtctagatgccatagaagacctcatggttgtgcctgacaaaatctccgaagttgtagagcttctaaagaagcttccagatcttgagaggctactcag

SEQ ID NO: 3381 - DNA, 121 bp, Homo sapiens
ctgagtagcctctcaagatctggaagcttctttagaagctctacaacttcggagattttgtcaggcacaaccatgaggtcttctatggcatctagacgatcattaatagcataatggttac

SEQ ID NO: 3382 - DNA, 17 bp, Homo sapiens
tgtgcctgacaaaatct

SEQ ID NO: 3383 - DNA, 17 bp, Homo sapiens
agattttgtcaggcaca

SEQ ID NO: 3384 - DNA, 121 bp, Homo sapiens
ctcccctgaagagtcagaaccacccagacagcagggctataatgtatgaagaaactacatacagcaagaagaagattattgattttctttctgctctggaaggattcaaagtaatgtgtaa

SEQ ID NO: 3385 - DNA, 121 bp, Homo sapiens
ttacacattactttgaatccttccagagcagaaagaaaatcaataatcttcttcttgctgtatgtagtttcttcatacattatagccctgctgtctgggtggttctgactcttcaggggag

SEQ ID NO: 3386 - DNA, 17 bp, Homo sapiens
aactacatacagcaaga

SEQ ID NO: 3387 - DNA, 17 bp, Homo sapiens
tcttgctgtatgtagtt

SEQ ID NO: 3388 - DNA, 121 bp, Homo sapiens
tatagtcgagggggtgatggtcctatgtgtcgcccagtaattctgttgccggaagataccccccccttcttagagcttaaaggatcacgccatccttgcattacgaagactttttttggag

SEQ ID NO: 3389 - DNA, 121 bp, Homo sapiens
ctccaaaaaaagtcttcgtaatgcaaggatggcgtgatcctttaagctctaagaaggggggggtatcttccggcaacagaattactgggcgacacataggaccatcaccccctcgactata

SEQ ID NO: 3390 - DNA, 17 bp, Homo sapiens
aagataccccccccttc

SEQ ID NO: 3391 - DNA, 17 bp, Homo sapiens
gaaggggggggtatctt

SEQ ID NO: 3392 - DNA, 121 bp, Homo sapiens
actataaaatgtcgtacattattttcaactcactaccattcattagtagaagattattctcaaaatgttgctgtgcgcctaggacatatggtatgtgcaaattgtttttttccacaaattc

SEQ ID NO: 3393 - DNA, 121 bp, Homo sapiens
gaatttgtggaaaaaaacaatttgcacataccatatgtcctaggcgcacagcaacattttgagaataatcttctactaatgaatggtagtgagttgaaaataatgtacgacattttatagt

SEQ ID NO: 3394 - DNA, 17 bp, Homo sapiens
attattctcaaaatgtt

SEQ ID NO: 3395 - DNA, 17 bp, Homo sapiens
aacattttgagaataat

SEQ ID NO: 3396 - DNA, 121 bp, Homo sapiens
ttgttccacacaggatgccaggccaaggtggagcaagcggtggagacagagccggagcccgagctgcgccagcagaccgagtggcagagcggccagcgctgggaactggcactgggtcgct

SEQ ID NO: 3397 - DNA, 121 bp, Homo sapiens
agcgacccagtgccagttcccagcgctggccgctctgccactcggtctgctggcgcagctcgggctccggctctgtctccaccgcttgctccaccttggcctggcatcctgtgtggaacaa

SEQ ID NO: 3398 - DNA, 17 bp, Homo sapiens
cggagcccgagctgcgc

SEQ ID NO: 3399 - DNA, 17 bp, Homo sapiens
gcgcagctcgggctccg

SEQ ID NO: 3400 - DNA, 121 bp, Homo sapiens
caaggtggagcaagcggtggagacagagccggagcccgagctgcgccagcagaccgagtggcagagcggccagcgctgggaactggcactgggtcgcttttgggattacctgcgctgggtg

SEQ ID NO: 3401 - DNA, 121 bp, Homo sapiens
cacccagcgcaggtaatcccaaaagcgacccagtgccagttcccagcgctggccgctctgccactcggtctgctggcgcagctcgggctccggctctgtctccaccgcttgctccaccttg

SEQ ID NO: 3402 - DNA, 17 bp, Homo sapiens
accgagtggcagagcgg

SEQ ID NO: 3403 - DNA, 17 bp, Homo sapiens
ccgctctgccactcggt

SEQ ID NO: 3404 - DNA, 121 bp, Homo sapiens
cagagccggagcccgagctgcgccagcagaccgagtggcagagcggccagcgctgggaactggcactgggtcgcttttgggattacctgcgctgggtgcagacactgtctgagcaggtgca

SEQ ID NO: 3405 - DNA, 121 bp, Homo sapiens
tgcacctgctcagacagtgtctgcacccagcgcaggtaatcccaaaagcgacccagtgccagttcccagcgctggccgctctgccactcggtctgctggcgcagctcgggctccggctctg

SEQ ID NO: 3406 - DNA, 17 bp, Homo sapiens
ctgggaactggcactgg

SEQ ID NO: 3407 - DNA, 17 bp, Homo sapiens
ccagtgccagttcccag

SEQ ID NO: 3408 - DNA, 121 bp, Homo sapiens
cggctgtccaaggagctgcaggcggcgcaggcccggctgggcgcggacatggaggacgtgtgcggccgcctggtgcagtaccgcggcgaggtgcaggccatgctcggccagagcaccgagg

SEQ ID NO: 3409 - DNA, 121 bp, Homo sapiens
cctcggtgctctggccgagcatggcctgcacctcgccgcggtactgcaccaggcggccgcacacgtcctccatgtccgcgcccagccgggcctgcgccgcctgcagctccttggacagccg

SEQ ID NO: 3410 - DNA, 17 bp, Homo sapiens
aggacgtgtgcggccgc

SEQ ID NO: 3411 - DNA, 17 bp, Homo sapiens
gcggccgcacacgtcct

SEQ ID NO: 3412 - DNA, 121 bp, Homo sapiens
acatggaggacgtgtgcggccgcctggtgcagtaccgcggcgaggtgcaggccatgctcggccagagcaccgaggagctgcgggtgcgcctcgcctcccacctgcgcaagctgcgtaagcg

SEQ ID NO: 3413 - DNA, 121 bp, Homo sapiens
cgcttacgcagcttgcgcaggtgggaggcgaggcgcacccgcagctcctcggtgctctggccgagcatggcctgcacctcgccgcggtactgcaccaggcggccgcacacgtcctccatgt

SEQ ID NO: 3414 - DNA, 17 bp, Homo sapiens
catgctcggccagagca

SEQ ID NO: 3415 - DNA, 17 bp, Homo sapiens
tgctctggccgagcatg

SEQ ID NO: 3416 - DNA, 121 bp, Homo sapiens
gtgcagtaccgcggcgaggtgcaggccatgctcggccagagcaccgaggagctgcgggtgcgcctcgcctcccacctgcgcaagctgcgtaagcggctcctccgcgatgccgatgacctgc

SEQ ID NO: 3417 - DNA, 121 bp, Homo sapiens
gcaggtcatcggcatcgcggaggagccgcttacgcagcttgcgcaggtgggaggcgaggcgcacccgcagctcctcggtgctctggccgagcatggcctgcacctcgccgcggtactgcac

SEQ ID NO: 3418 - DNA, 17 bp, Homo sapiens
tgcgggtgcgcctcgcc

SEQ ID NO: 3419 - DNA, 17 bp, Homo sapiens
ggcgaggcgcacccgca

SEQ ID NO: 3420 - DNA, 121 bp, Homo sapiens
tgcagtaccgcggcgaggtgcaggccatgctcggccagagcaccgaggagctgcgggtgcgcctcgcctcccacctgcgcaagctgcgtaagcggctcctccgcgatgccgatgacctgca

SEQ ID NO: 3421 - DNA, 121 bp, Homo sapiens
tgcaggtcatcggcatcgcggaggagccgcttacgcagcttgcgcaggtgggaggcgaggcgcacccgcagctcctcggtgctctggccgagcatggcctgcacctcgccgcggtactgca

SEQ ID NO: 3422 - DNA, 17 bp, Homo sapiens
gcgggtgcgcctcgcct

SEQ ID NO: 3423 - DNA, 17 bp, Homo sapiens
aggcgaggcgcacccgc

SEQ ID NO: 3424 - DNA, 121 bp, Homo sapiens; identical to SEQ ID NO: 3416

SEQ ID NO: 3425 - DNA, 121 bp, Homo sapiens; identical to SEQ ID NO: 3417

SEQ ID NO: 3426 - DNA, 17 bp, Homo sapiens
tgcgggtgcgcctcgcc

SEQ ID NO: 3427 - DNA, 17 bp, Homo sapiens
ggcgaggcgcacccgca

SEQ ID NO: 3428 - DNA, 121 bp, Homo sapiens
gtgcaggccatgctcggccagagcaccgaggagctgcgggtgcgcctcgcctcccacctgcgcaagctgcgtaagcggctcctccgcgatgccgatgacctgcagaagcgcctggcagtgt

SEQ ID NO: 3429 - DNA, 121 bp, Homo sapiens
acactgccaggcgcttctgcaggtcatcggcatcgcggaggagccgcttacgcagcttgcgcaggtgggaggcgaggcgcacccgcagctcctcggtgctctggccgagcatggcctgcac

SEQ ID NO: 3430 - DNA, 17 bp, Homo sapiens
cccacctgcgcaagctg

SEQ ID NO: 3431 - DNA, 17 bp, Homo sapiens
cagcttgcgcaggtggg

SEQ ID NO: 3432 - DNA, 121 bp, Homo sapiens
tgcaggccatgctcggccagagcaccgaggagctgcgggtgcgcctcgcctcccacctgcgcaagctgcgtaagcggctcctccgcgatgccgatgacctgcagaagcgcctggcagtgta

SEQ ID NO: 3433 - DNA, 121 bp, Homo sapiens
tacactgccaggcgcttctgcaggtcatcggcatcgcggaggagccgcttacgcagcttgcgcaggtgggaggcgaggcgcacccgcagctcctcggtgctctggccgagcatggcctgca

SEQ ID NO: 3434 - DNA, 17 bp, Homo sapiens
ccacctgcgcaagctgc

SEQ ID NO: 3435 - DNA, 17 bp, Homo sapiens
gcagcttgcgcaggtgg

SEQ ID NO: 3436 - DNA, 121 bp, Homo sapiens
atgctcggccagagcaccgaggagctgcgggtgcgcctcgcctcccacctgcgcaagctgcgtaagcggctcctccgcgatgccgatgacctgcagaagcgcctggcagtgtaccaggccg

SEQ ID NO: 3437 - DNA, 121 bp, Homo sapiens
cggcctggtacactgccaggcgcttctgcaggtcatcggcatcgcggaggagccgcttacgcagcttgcgcaggtgggaggcgaggcgcacccgcagctcctcggtgctctggccgagcat

SEQ ID NO: 3438 - DNA, 17 bp, Homo sapiens
gcaagctgcgtaagcgg

SEQ ID NO: 3439 - DNA, 17 bp, Homo sapiens
ccgcttacgcagcttgc

SEQ ID NO: 3440 - DNA, 121 bp, Homo sapiens
tgctcggccagagcaccgaggagctgcgggtgcgcctcgcctcccacctgcgcaagctgcgtaagcggctcctccgcgatgccgatgacctgcagaagcgcctggcagtgtaccaggccgg

SEQ ID NO: 3441 - DNA, 121 bp, Homo sapiens
ccggcctggtacactgccaggcgcttctgcaggtcatcggcatcgcggaggagccgcttacgcagcttgcgcaggtgggaggcgaggcgcacccgcagctcctcggtgctctggccgagca

SEQ ID NO: 3442 - DNA, 17 bp, Homo sapiens
caagctgcgtaagcggc

SEQ ID NO: 3443 - DNA, 17 bp, Homo sapiens
gccgcttacgcagcttg

SEQ ID NO: 3444 - DNA, 121 bp, Homo sapiens
ctcggccagagcaccgaggagctgcgggtgcgcctcgcctcccacctgcgcaagctgcgtaagcggctcctccgcgatgccgatgacctgcagaagcgcctggcagtgtaccaggccgggg

SEQ ID NO: 3445 - DNA, 121 bp, Homo sapiens
ccccggcctggtacactgccaggcgcttctgcaggtcatcggcatcgcggaggagccgcttacgcagcttgcgcaggtgggaggcgaggcgcacccgcagctcctcggtgctctggccgag

SEQ ID NO: 3446 - DNA, 17 bp, Homo sapiens
agctgcgtaagcggctc

SEQ ID NO: 3447 - DNA, 17 bp, Homo sapiens
gagccgcttacgcagct

SEQ ID NO: 3448 - DNA, 121 bp, Homo sapiens; identical to SEQ ID NO: 3444

SEQ ID NO: 3449 - DNA, 121 bp, Homo sapiens; identical to SEQ ID NO: 3445

SEQ ID NO: 3450 - DNA, 17 bp, Homo sapiens
agctgcgtaagcggctc

SEQ ID NO: 3451 - DNA, 17 bp, Homo sapiens
gagccgcttacgcagct

SEQ ID NO: 3452 - DNA, 121 bp, Homo sapiens
gcctcccacctgcgcaagctgcgtaagcggctcctccgcgatgccgatgacctgcagaagcgcctggcagtgtaccaggccggggcccgcgagggcgccgagcgcggcctcagcgccatcc

SEQ ID NO: 3453 - DNA, 121 bp, Homo sapiens
ggatggcgctgaggccgcgctcggcgccctcgcgggccccggcctggtacactgccaggcgcttctgcaggtcatcggcatcgcggaggagccgcttacgcagcttgcgcaggtgggaggc

SEQ ID NO: 3454 - DNA, 17 bp, Homo sapiens
tgcagaagcgcctggca

SEQ ID NO: 3455 - DNA, 17 bp, Homo sapiens
tgccaggcgcttctgca

SEQ ID NO: 3456 - DNA, 121 bp, Homo sapiens
cgcgagggcgccgagcgcggcctcagcgccatccgcgagcgcctggggcccctggtggaacagggccgcgtgcgggccgccactgtgggctccctggccggccagccgctacaggagcggg

SEQ ID NO: 3457 - DNA, 121 bp, Homo sapiens
cccgctcctgtagcggctggccggccagggagcccacagtggcggcccgcacgcggccctgttccaccaggggccccaggcgctcgcggatggcgctgaggccgcgctcggcgccctcgcg

SEQ ID NO: 3458 - DNA, 17 bp, Homo sapiens
tggtggaacagggccgc

SEQ ID NO: 3459 - DNA, 17 bp, Homo sapiens
gcggccctgttccacca

SEQ ID NO: 3460 - DNA, 121 bp, Homo sapiens
tgcgggccgccactgtgggctccctggccggccagccgctacaggagcgggcccaggcctggggcgagcggctgcgcgcgcggatggaggagatgggcagccggacccgcgaccgcctgga

SEQ ID NO: 3461 - DNA, 121 bp, Homo sapiens
tccaggcggtcgcgggtccggctgcccatctcctccatccgcgcgcgcagccgctcgccccaggcctgggcccgctcctgtagcggctggccggccagggagcccacagtggcggcccgca

SEQ ID NO: 3462 - DNA, 17 bp, Homo sapiens
ccaggcctggggcgagc

SEQ ID NO: 3463 - DNA, 17 bp, Homo sapiens
gctcgccccaggcctgg

SEQ ID NO: 3464 - DNA, 121 bp, Homo sapiens
caggcctggggcgagcggctgcgcgcgcggatggaggagatgggcagccggacccgcgaccgcctggacgaggtgaaggagcaggtggcggaggtgcgcgccaagctggaggagcaggccc

SEQ ID NO: 3465 - DNA, 121 bp, Homo sapiens
gggcctgctcctccagcttggcgcgcacctccgccacctgctccttcacctcgtccaggcggtcgcgggtccggctgcccatctcctccatccgcgcgcgcagccgctcgccccaggcctg

SEQ ID NO: 3466 - DNA, 17 bp, Homo sapiens
cccgcgaccgcctggac

SEQ ID NO: 3467 - DNA, 17 bp, Homo sapiens
gtccaggcggtcgcggg

SEQ ID NO: 3468 - DNA, 121 bp, Homo sapiens
cggacccgcgaccgcctggacgaggtgaaggagcaggtggcggaggtgcgcgccaagctggaggagcaggcccagcagatacgcctgcaggccgaggccttccaggcccgcctcaagagct

SEQ ID NO: 3469 - DNA, 121 bp, Homo sapiens
agctcttgaggcgggcctggaaggcctcggcctgcaggcgtatctgctgggcctgctcctccagcttggcgcgcacctccgccacctgctccttcacctcgtccaggcggtcgcgggtccg

SEQ ID NO: 3470 - DNA, 17 bp, Homo sapiens
ccaagctggaggagcag

SEQ ID NO: 3471 - DNA, 17 bp, Homo sapiens
ctgctcctccagcttgg

SEQ ID NO: 3472 - DNA, 121 bp, Homo sapiens
gcgttgagagaccctttctccttttcctctctctcagtgggcgacagatgcgaaagaaacgagttccagtgccaagacgggaaatgcatctcctacaagtgggtctgcgatggcagcgctg

SEQ ID NO: 3473 - DNA, 121 bp, Homo sapiens
cagcgctgccatcgcagacccacttgtaggagatgcatttcccgtcttggcactggaactcgtttctttcgcatctgtcgcccactgagagagaggaaaaggagaaagggtctctcaacgc

SEQ ID NO: 3474 - DNA, 17 bp, Homo sapiens
aaagaaacgagttccag

SEQ ID NO: 3475 - DNA, 17 bp, Homo sapiens
ctggaactcgtttcttt

SEQ ID NO: 3476 - DNA, 121 bp, Homo sapiens
agagaccctttctccttttcctctctctcagtgggcgacagatgcgaaagaaacgagttccagtgccaagacgggaaatgcatctcctacaagtgggtctgcgatggcagcgctgagtgcc

SEQ ID NO: 3477 - DNA, 121 bp, Homo sapiens
ggcactcagcgctgccatcgcagacccacttgtaggagatgcatttcccgtcttggcactggaactcgtttctttcgcatctgtcgcccactgagagagaggaaaaggagaaagggtctct

SEQ ID NO: 3478 - DNA, 17 bp, Homo sapiens
acgagttccagtgccaa

SEQ ID NO: 3479 - DNA, 17 bp, Homo sapiens
ttggcactggaactcgt

SEQ ID NO: 3480 - DNA, 121 bp, Homo sapiens
cctttctccttttcctctctctcagtgggcgacagatgcgaaagaaacgagttccagtgccaagacgggaaatgcatctcctacaagtgggtctgcgatggcagcgctgagtgccaggatg

SEQ ID NO: 3481 - DNA, 121 bp, Homo sapiens
catcctggcactcagcgctgccatcgcagacccacttgtaggagatgcatttcccgtcttggcactggaactcgtttctttcgcatctgtcgcccactgagagagaggaaaaggagaaagg

SEQ ID NO: 3482 - DNA, 17 bp, Homo sapiens
tccagtgccaagacggg

SEQ ID NO: 3483 - DNA, 17 bp, Homo sapiens
cccgtcttggcactgga

SEQ ID NO: 3484 - DNA, 121 bp, Homo sapiens
gcgacagatgcgaaagaaacgagttccagtgccaagacgggaaatgcatctcctacaagtgggtctgcgatggcagcgctgagtgccaggatggctctgatgagtcccaggagacgtgctg

SEQ ID NO: 3485 - DNA, 121 bp, Homo sapiens
cagcacgtctcctgggactcatcagagccatcctggcactcagcgctgccatcgcagacccacttgtaggagatgcatttcccgtcttggcactggaactcgtttctttcgcatctgtcgc

SEQ ID NO: 3486 - DNA, 17 bp, Homo sapiens
ctacaagtgggtctgcg

SEQ ID NO: 3487 - DNA, 17 bp, Homo sapiens
cgcagacccacttgtag

SEQ ID NO: 3488 - DNA, 121 bp, Homo sapiens
aacgagttccagtgccaagacgggaaatgcatctcctacaagtgggtctgcgatggcagcgctgagtgccaggatggctctgatgagtcccaggagacgtgctgtgagtcccctttgggca

SEQ ID NO: 3489 - DNA, 121 bp, Homo sapiens
tgcccaaaggggactcacagcacgtctcctgggactcatcagagccatcctggcactcagcgctgccatcgcagacccacttgtaggagatgcatttcccgtcttggcactggaactcgtt

SEQ ID NO: 3490 - DNA, 17 bp, Homo sapiens
atggcagcgctgagtgc

SEQ ID NO: 3491 - DNA, 17 bp, Homo sapiens
gcactcagcgctgccat

SEQ ID NO: 3492 - DNA, 121 bp, Homo sapiens
tccagtgccaagacgggaaatgcatctcctacaagtgggtctgcgatggcagcgctgagtgccaggatggctctgatgagtcccaggagacgtgctgtgagtcccctttgggcatgatatg

SEQ ID NO: 3493 - DNA, 121 bp, Homo sapiens
catatcatgcccaaaggggactcacagcacgtctcctgggactcatcagagccatcctggcactcagcgctgccatcgcagacccacttgtaggagatgcatttcccgtcttggcactgga

SEQ ID NO: 3494 - DNA, 17 bp, Homo sapiens
cgctgagtgccaggatg

SEQ ID NO: 3495 - DNA, 17 bp, Homo sapiens
catcctggcactcagcg

SEQ ID NO: 3496 - DNA, 121 bp, Homo sapiens
aatcctgtctcttctgtagtgtctgtcacctgcaaatccggggacttcagctgtgggggccgtgtcaaccgctgcattcctcagttctggaggtgcgatggccaagtggactgcgacaacg

SEQ ID NO: 3497 - DNA, 121 bp, Homo sapiens
cgttgtcgcagtccacttggccatcgcacctccagaactgaggaatgcagcggttgacacggcccccacagctgaagtccccggatttgcaggtgacagacactacagaagagacaggatt

SEQ ID NO: 3498 - DNA, 17 bp, Homo sapiens
gtgggggccgtgtcaac

SEQ ID NO: 3499 - DNA, 17 bp, Homo sapiens
gttgacacggcccccac

SEQ ID NO: 3500 - DNA, 121 bp, Homo sapiens
tctgtcacctgcaaatccggggacttcagctgtgggggccgtgtcaaccgctgcattcctcagttctggaggtgcgatggccaagtggactgcgacaacggctcagacgagcaaggctgtc

SEQ ID NO: 3501 - DNA, 121 bp, Homo sapiens
gacagccttgctcgtctgagccgttgtcgcagtccacttggccatcgcacctccagaactgaggaatgcagcggttgacacggcccccacagctgaagtccccggatttgcaggtgacaga

SEQ ID NO: 3502 - DNA, 17 bp, Homo sapiens
gcattcctcagttctgg

SEQ ID NO: 3503 - DNA, 17 bp, Homo sapiens
ccagaactgaggaatgc

SEQ ID NO: 3504 - DNA, 121 bp, Homo sapiens
acctgcaaatccggggacttcagctgtgggggccgtgtcaaccgctgcattcctcagttctggaggtgcgatggccaagtggactgcgacaacggctcagacgagcaaggctgtcgtaagt

SEQ ID NO: 3505 - DNA, 121 bp, Homo sapiens
acttacgacagccttgctcgtctgagccgttgtcgcagtccacttggccatcgcacctccagaactgaggaatgcagcggttgacacggcccccacagctgaagtccccggatttgcaggt

SEQ ID NO: 3506 - DNA, 17 bp, Homo sapiens
ctcagttctggaggtgc

SEQ ID NO: 3507 - DNA, 17 bp, Homo sapiens
gcacctccagaactgag

SEQ ID NO: 3508 - DNA, 121 bp, Homo sapiens
cctgcaaatccggggacttcagctgtgggggccgtgtcaaccgctgcattcctcagttctggaggtgcgatggccaagtggactgcgacaacggctcagacgagcaaggctgtcgtaagtg

SEQ ID NO: 3509 - DNA, 121 bp, Homo sapiens
cacttacgacagccttgctcgtctgagccgttgtcgcagtccacttggccatcgcacctccagaactgaggaatgcagcggttgacacggcccccacagctgaagtccccggatttgcagg

SEQ ID NO: 3510 - DNA, 17 bp, Homo sapiens
tcagttctggaggtgcg

SEQ ID NO: 3511 - DNA, 17 bp, Homo sapiens
cgcacctccagaactga

SEQ ID NO: 3512 - DNA, 121 bp, Homo sapiens
aaatccggggacttcagctgtgggggccgtgtcaaccgctgcattcctcagttctggaggtgcgatggccaagtggactgcgacaacggctcagacgagcaaggctgtcgtaagtgtggcc

SEQ ID NO: 3513 - DNA, 121 bp, Homo sapiens
ggccacacttacgacagccttgctcgtctgagccgttgtcgcagtccacttggccatcgcacctccagaactgaggaatgcagcggttgacacggcccccacagctgaagtccccggattt

SEQ ID NO: 3514 - DNA, 17 bp, Homo sapiens
tctggaggtgcgatggc

SEQ ID NO: 3515 - DNA, 17 bp, Homo sapiens
gccatcgcacctccaga

SEQ ID NO: 3516 - DNA, 121 bp, Homo sapiens
atccggggacttcagctgtgggggccgtgtcaaccgctgcattcctcagttctggaggtgcgatggccaagtggactgcgacaacggctcagacgagcaaggctgtcgtaagtgtggccct

SEQ ID NO: 3517 - DNA, 121 bp, Homo sapiens
agggccacacttacgacagccttgctcgtctgagccgttgtcgcagtccacttggccatcgcacctccagaactgaggaatgcagcggttgacacggcccccacagctgaagtccccggat

SEQ ID NO: 3518 - DNA, 17 bp, Homo sapiens
tggaggtgcgatggcca

SEQ ID NO: 3519 - DNA, 17 bp, Homo sapiens
tggccatcgcacctcca

SEQ ID NO: 3520 - DNA, 121 bp, Homo sapiens
aatccggggacttcagctgtgggggccgtgtcaaccgctgcattcctcagttctggaggtgcgatggccaagtggactgcgacaacggctcagacgagcaaggctgtcgtaagtgtggccc

SEQ ID NO: 3521 - DNA, 121 bp, Homo sapiens
gggccacacttacgacagccttgctcgtctgagccgttgtcgcagtccacttggccatcgcacctccagaactgaggaatgcagcggttgacacggcccccacagctgaagtccccggatt

SEQ ID NO: 3522 - DNA, 17 bp, Homo sapiens
ctggaggtgcgatggcc

SEQ ID NO: 3523 - DNA, 17 bp, Homo sapiens
ggccatcgcacctccag

SEQ ID NO: 3524 - DNA, 121 bp, Homo sapiens
tccggggacttcagctgtgggggccgtgtcaaccgctgcattcctcagttctggaggtgcgatggccaagtggactgcgacaacggctcagacgagcaaggctgtcgtaagtgtggccctg

SEQ ID NO: 3525 - DNA, 121 bp, Homo sapiens
cagggccacacttacgacagccttgctcgtctgagccgttgtcgcagtccacttggccatcgcacctccagaactgaggaatgcagcggttgacacggcccccacagctgaagtccccgga

SEQ ID NO: 3526 - DNA, 17 bp, Homo sapiens
ggaggtgcgatggccaa

SEQ ID NO: 3527 - DNA, 17 bp, Homo sapiens
ttggccatcgcacctcc

SEQ ID NO: 3528 - DNA, 121 bp, Homo sapiens
ccggggacttcagctgtgggggccgtgtcaaccgctgcattcctcagttctggaggtgcgatggccaagtggactgcgacaacggctcagacgagcaaggctgtcgtaagtgtggccctgc

SEQ ID NO: 3529 - DNA, 121 bp, Homo sapiens
gcagggccacacttacgacagccttgctcgtctgagccgttgtcgcagtccacttggccatcgcacctccagaactgaggaatgcagcggttgacacggcccccacagctgaagtccccgg

SEQ ID NO: 3530 - DNA, 17 bp, Homo sapiens
gaggtgcgatggccaag

SEQ ID NO: 3531 - DNA, 17 bp, Homo sapiens
cttggccatcgcacctc

SEQ ID NO: 3532 - DNA, 121 bp, Homo sapiens; identical to SEQ ID NO: 3524

SEQ ID NO: 3533 - DNA, 121 bp, Homo sapiens; identical to SEQ ID NO: 3525

SEQ ID NO: 3534 - DNA, 17 bp, Homo sapiens
ggaggtgcgatggccaa

SEQ ID NO: 3535 - DNA, 17 bp, Homo sapiens
ttggccatcgcacctcc

SEQ ID NO: 3536 - DNA, 121 bp, Homo sapiens
gacttcagctgtgggggccgtgtcaaccgctgcattcctcagttctggaggtgcgatggccaagtggactgcgacaacggctcagacgagcaaggctgtcgtaagtgtggccctgcctttg

SEQ ID NO: 3537 - DNA, 121 bp, Homo sapiens
caaaggcagggccacacttacgacagccttgctcgtctgagccgttgtcgcagtccacttggccatcgcacctccagaactgaggaatgcagcggttgacacggcccccacagctgaagtc

SEQ ID NO: 3538 - DNA, 17 bp, Homo sapiens
gcgatggccaagtggac

SEQ ID NO: 3539 - DNA, 17 bp, Homo sapiens
gtccacttggccatcgc

SEQ ID NO: 3540 - DNA, 121 bp, Homo sapiens
tgtgggggccgtgtcaaccgctgcattcctcagttctggaggtgcgatggccaagtggactgcgacaacggctcagacgagcaaggctgtcgtaagtgtggccctgcctttgctattgagc

SEQ ID NO: 3541 - DNA, 121 bp, Homo sapiens
gctcaatagcaaaggcagggccacacttacgacagccttgctcgtctgagccgttgtcgcagtccacttggccatcgcacctccagaactgaggaatgcagcggttgacacggcccccaca

SEQ ID NO: 3542 - DNA, 17 bp, Homo sapiens
aagtggactgcgacaac

SEQ ID NO: 3543 - DNA, 17 bp, Homo sapiens
gttgtcgcagtccactt

SEQ ID NO: 3544 - DNA, 121 bp, Homo sapiens
tcaaccgctgcattcctcagttctggaggtgcgatggccaagtggactgcgacaacggctcagacgagcaaggctgtcgtaagtgtggccctgcctttgctattgagcctatctgagtcct

SEQ ID NO: 3545 - DNA, 121 bp, Homo sapiens
aggactcagataggctcaatagcaaaggcagggccacacttacgacagccttgctcgtctgagccgttgtcgcagtccacttggccatcgcacctccagaactgaggaatgcagcggttga

SEQ ID NO: 3546 - DNA, 17 bp, Homo sapiens
caacggctcagacgagc

SEQ ID NO: 3547 - DNA, 17 bp, Homo sapiens
gctcgtctgagccgttg

SEQ ID NO: 3548 - DNA, 121 bp, Homo sapiens
cgctgcattcctcagttctggaggtgcgatggccaagtggactgcgacaacggctcagacgagcaaggctgtcgtaagtgtggccctgcctttgctattgagcctatctgagtcctgggga

SEQ ID NO: 3549 - DNA, 121 bp, Homo sapiens
tccccaggactcagataggctcaatagcaaaggcagggccacacttacgacagccttgctcgtctgagccgttgtcgcagtccacttggccatcgcacctccagaactgaggaatgcagcg

SEQ ID NO: 3550 - DNA, 17 bp, Homo sapiens
gctcagacgagcaaggc

SEQ ID NO: 3551 - DNA, 17 bp, Homo sapiens
gccttgctcgtctgagc

SEQ ID NO: 3552 - DNA, 121 bp, Homo sapiens; identical to SEQ ID NO: 3548

SEQ ID NO: 3553 - DNA, 121 bp, Homo sapiens; identical to SEQ ID NO: 3549

SEQ ID NO: 3554 - DNA, 17 bp, Homo sapiens
gctcagacgagcaaggc

SEQ ID NO: 3555 - DNA, 17 bp, Homo sapiens
gccttgctcgtctgagc

SEQ ID NO: 3556 - DNA, 121 bp, Homo sapiens
tgcattcctcagttctggaggtgcgatggccaagtggactgcgacaacggctcagacgagcaaggctgtcgtaagtgtggccctgcctttgctattgagcctatctgagtcctggggagtg

SEQ ID NO: 3557 - DNA, 121 bp, Homo sapiens
cactccccaggactcagataggctcaatagcaaaggcagggccacacttacgacagccttgctcgtctgagccgttgtcgcagtccacttggccatcgcacctccagaactgaggaatgca

SEQ ID NO: 3558 - DNA, 17 bp, Homo sapiens
cagacgagcaaggctgt

SEQ ID NO: 3559 - DNA, 17 bp, Homo sapiens
acagccttgctcgtctg

SEQ ID NO: 3560 - DNA, 121 bp, Homo sapiens
tgggagacttcacacggtgatggtggtctcggcccatccatccctgcagcccccaagacgtgctcccaggacgagtttcgctgccacgatgggaagtgcatctctcggcagttcgtctgtg

SEQ ID NO: 3561 - DNA, 121 bp, Homo sapiens
cacagacgaactgccgagagatgcacttcccatcgtggcagcgaaactcgtcctgggagcacgtcttgggggctgcagggatggatgggccgagaccaccatcaccgtgtgaagtctccca

SEQ ID NO: 3562 - DNA, 17 bp, Homo sapiens
ccaagacgtgctcccag

SEQ ID NO: 3563 - DNA, 17 bp, Homo sapiens
ctgggagcacgtcttgg

SEQ ID NO: 3564 - DNA, 121 bp, Homo sapiens
cacggtgatggtggtctcggcccatccatccctgcagcccccaagacgtgctcccaggacgagtttcgctgccacgatgggaagtgcatctctcggcagttcgtctgtgactcagaccggg

SEQ ID NO: 3565 - DNA, 121 bp, Homo sapiens
cccggtctgagtcacagacgaactgccgagagatgcacttcccatcgtggcagcgaaactcgtcctgggagcacgtcttgggggctgcagggatggatgggccgagaccaccatcaccgtg

SEQ ID NO: 3566 - DNA, 17 bp, Homo sapiens
cccaggacgagtttcgc

SEQ ID NO: 3567 - DNA, 17 bp, Homo sapiens
gcgaaactcgtcctggg

SEQ ID NO: 3568 - DNA, 121 bp, Homo sapiens
ggtggtctcggcccatccatccctgcagcccccaagacgtgctcccaggacgagtttcgctgccacgatgggaagtgcatctctcggcagttcgtctgtgactcagaccgggactgcttgg

SEQ ID NO: 3569 - DNA, 121 bp, Homo sapiens
ccaagcagtcccggtctgagtcacagacgaactgccgagagatgcacttcccatcgtggcagcgaaactcgtcctgggagcacgtcttgggggctgcagggatggatgggccgagaccacc

SEQ ID NO: 3570 - DNA, 17 bp, Homo sapiens
agtttcgctgccacgat

SEQ ID NO: 3571 - DNA, 17 bp, Homo sapiens
atcgtggcagcgaaact

SEQ ID NO: 3572 - DNA, 121 bp, Homo sapiens
ctcggcccatccatccctgcagcccccaagacgtgctcccaggacgagtttcgctgccacgatgggaagtgcatctctcggcagttcgtctgtgactcagaccgggactgcttggacggct

SEQ ID NO: 3573 - DNA, 121 bp, Homo sapiens
agccgtccaagcagtcccggtctgagtcacagacgaactgccgagagatgcacttcccatcgtggcagcgaaactcgtcctgggagcacgtcttgggggctgcagggatggatgggccgag

SEQ ID NO: 3574 - DNA, 17 bp, Homo sapiens
gctgccacgatgggaag

SEQ ID NO: 3575 - DNA, 17 bp, Homo sapiens
cttcccatcgtggcagc

SEQ ID NO: 3576 - DNA, 121 bp, Homo sapiens
gggtcgggacactgcctggcagaggctgcgagcatggggccctggggctggaaattgcgctggaccgtcgccttgctcctcgccgcggcggggactgcaggtaaggcttgctccaggcgcc

SEQ ID NO: 3577 - DNA, 121 bp, Homo sapiens
ggcgcctggagcaagccttacctgcagtccccgccgcggcgaggagcaaggcgacggtccagcgcaatttccagccccagggccccatgctcgcagcctctgccaggcagtgtcccgaccc

SEQ ID NO: 3578 - DNA, 17 bp, Homo sapiens
aattgcgctggaccgtc

SEQ ID NO: 3579 - DNA, 17 bp, Homo sapiens
gacggtccagcgcaatt

SEQ ID NO: 3580 - DNA, 121 bp, Homo sapiens
cagcaggtcgtgatccgggtcgggacactgcctggcagaggctgcgagcatggggccctggggctggaaattgcgctggaccgtcgccttgctcctcgccgcggcggggactgcaggtaag

SEQ ID NO: 3581 - DNA, 121 bp, Homo sapiens
cttacctgcagtccccgccgcggcgaggagcaaggcgacggtccagcgcaatttccagccccagggccccatgctcgcagcctctgccaggcagtgtcccgacccggatcacgacctgctg

SEQ ID NO: 3582 - DNA, 17 bp, Homo sapiens
gggccctggggctggaa

SEQ ID NO: 3583 - DNA, 17 bp, Homo sapiens
ttccagccccagggccc

SEQ ID NO: 3584 - DNA, 121 bp, Homo sapiens
cagctaggacacagcaggtcgtgatccgggtcgggacactgcctggcagaggctgcgagcatggggccctggggctggaaattgcgctggaccgtcgccttgctcctcgccgcggcgggga

SEQ ID NO: 3585 - DNA, 121 bp, Homo sapiens
tccccgccgcggcgaggagcaaggcgacggtccagcgcaatttccagccccagggccccatgctcgcagcctctgccaggcagtgtcccgacccggatcacgacctgctgtgtcctagctg

SEQ ID NO: 3586 - DNA, 17 bp, Homo sapiens
ctgcgagcatggggccc

SEQ ID NO: 3587 - DNA, 17 bp, Homo sapiens
gggccccatgctcgcag

SEQ ID NO: 3588 - DNA, 121 bp, Homo sapiens; identical to SEQ ID NO: 3584

SEQ ID NO: 3589 - DNA, 121 bp, Homo sapiens; identical to SEQ ID NO: 3585

SEQ ID NO: 3590 - DNA, 17 bp, Homo sapiens
ctgcgagcatggggccc

SEQ ID NO: 3591 - DNA, 17 bp, Homo sapiens
gggccccatgctcgcag

SEQ ID NO: 3592 - DNA, 121 bp, Homo sapiens
atccctgcagcccccaagacgtgctcccaggacgagtttcgctgccacgatgggaagtgcatctctcggcagttcgtctgtgactcagaccgggactgcttggacggctcagacgaggcct

SEQ ID NO: 3593 - DNA, 121 bp, Homo sapiens
aggcctcgtctgagccgtccaagcagtcccggtctgagtcacagacgaactgccgagagatgcacttcccatcgtggcagcgaaactcgtcctgggagcacgtcttgggggctgcagggat

SEQ ID NO: 3594 - DNA, 17 bp, Homo sapiens
ggaagtgcatctctcgg

SEQ ID NO: 3595 - DNA, 17 bp, Homo sapiens
ccgagagatgcacttcc

SEQ ID NO: 3596 - DNA, 121 bp, Homo sapiens
gcccccaagacgtgctcccaggacgagtttcgctgccacgatgggaagtgcatctctcggcagttcgtctgtgactcagaccgggactgcttggacggctcagacgaggcctcctgcccgg

SEQ ID NO: 3597 - DNA, 121 bp, Homo sapiens
ccgggcaggaggcctcgtctgagccgtccaagcagtcccggtctgagtcacagacgaactgccgagagatgcacttcccatcgtggcagcgaaactcgtcctgggagcacgtcttgggggc

SEQ ID NO: 3598 - DNA, 17 bp, Homo sapiens
tctctcggcagttcgtc

SEQ ID NO: 3599 - DNA, 17 bp, Homo sapiens
gacgaactgccgagaga

SEQ ID NO: 3600 - DNA, 121 bp, Homo sapiens
tttcgctgccacgatgggaagtgcatctctcggcagttcgtctgtgactcagaccgggactgcttggacggctcagacgaggcctcctgcccggtgctcacctgtggtcccgccagcttcc

SEQ ID NO: 3601 - DNA, 121 bp, Homo sapiens
ggaagctggcgggaccacaggtgagcaccgggcaggaggcctcgtctgagccgtccaagcagtcccggtctgagtcacagacgaactgccgagagatgcacttcccatcgtggcagcgaaa

SEQ ID NO: 3602 - DNA, 17 bp, Homo sapiens
accgggactgcttggac

SEQ ID NO: 3603 - DNA, 17 bp, Homo sapiens
gtccaagcagtcccggt

SEQ ID NO: 3604 - DNA, 121 bp, Homo sapiens
aagtgcatctctcggcagttcgtctgtgactcagaccgggactgcttggacggctcagacgaggcctcctgcccggtgctcacctgtggtcccgccagcttccagtgcaacagctccacct

SEQ ID NO: 3605 - DNA, 121 bp, Homo sapiens
aggtggagctgttgcactggaagctggcgggaccacaggtgagcaccgggcaggaggcctcgtctgagccgtccaagcagtcccggtctgagtcacagacgaactgccgagagatgcactt

SEQ ID NO: 3606 - DNA, 17 bp, Homo sapiens
gctcagacgaggcctcc

SEQ ID NO: 3607 - DNA, 17 bp, Homo sapiens
ggaggcctcgtctgagc

SEQ ID NO: 3608 - DNA, 121 bp, Homo sapiens; identical to SEQ ID NO: 3604

SEQ ID NO: 3609 - DNA, 121 bp, Homo sapiens; identical to SEQ ID NO: 3605

SEQ ID NO: 3610 - DNA, 17 bp, Homo sapiens
gctcagacgaggcctcc

SEQ ID NO: 3611 - DNA, 17 bp, Homo sapiens
ggaggcctcgtctgagc

SEQ ID NO: 3612 - DNA, 121 bp, Homo sapiens
tcggcagttcgtctgtgactcagaccgggactgcttggacggctcagacgaggcctcctgcccggtgctcacctgtggtcccgccagcttccagtgcaacagctccacctgcatcccccag

SEQ ID NO: 3613 - DNA, 121 bp, Homo sapiens
ctgggggatgcaggtggagctgttgcactggaagctggcgggaccacaggtgagcaccgggcaggaggcctcgtctgagccgtccaagcagtcccggtctgagtcacagacgaactgccga

SEQ ID NO: 3614 - DNA, 17 bp, Homo sapiens
gcctcctgcccggtgct

SEQ ID NO: 3615 - DNA, 17 bp, Homo sapiens
agcaccgggcaggaggc

SEQ ID NO: 3616 - DNA, 121 bp, Homo sapiens
tgactcagaccgggactgcttggacggctcagacgaggcctcctgcccggtgctcacctgtggtcccgccagcttccagtgcaacagctccacctgcatcccccagctgtgggcctgcgac

SEQ ID NO: 3617 - DNA, 121 bp, Homo sapiens
gtcgcaggcccacagctgggggatgcaggtggagctgttgcactggaagctggcgggaccacaggtgagcaccgggcaggaggcctcgtctgagccgtccaagcagtcccggtctgagtca

SEQ ID NO: 3618 - DNA, 17 bp, Homo sapiens
ctcacctgtggtcccgc

SEQ ID NO: 3619 - DNA, 17 bp, Homo sapiens
gcgggaccacaggtgag

SEQ ID NO: 3620 - DNA, 121 bp, Homo sapiens
tgcttggacggctcagacgaggcctcctgcccggtgctcacctgtggtcccgccagcttccagtgcaacagctccacctgcatcccccagctgtgggcctgcgacaacgaccccgactgcg

SEQ ID NO: 3621 - DNA, 121 bp, Homo sapiens
cgcagtcggggtcgttgtcgcaggcccacagctgggggatgcaggtggagctgttgcactggaagctggcgggaccacaggtgagcaccgggcaggaggcctcgtctgagccgtccaagca

SEQ ID NO: 3622 - DNA, 17 bp, Homo sapiens
ccagcttccagtgcaac

SEQ ID NO: 3623 - DNA, 17 bp, Homo sapiens
gttgcactggaagctgg

SEQ ID NO: 3624 - DNA, 121 bp, Homo sapiens
ttggacggctcagacgaggcctcctgcccggtgctcacctgtggtcccgccagcttccagtgcaacagctccacctgcatcccccagctgtgggcctgcgacaacgaccccgactgcgaag

SEQ ID NO: 3625 - DNA, 121 bp, Homo sapiens
cttcgcagtcggggtcgttgtcgcaggcccacagctgggggatgcaggtggagctgttgcactggaagctggcgggaccacaggtgagcaccgggcaggaggcctcgtctgagccgtccaa

SEQ ID NO: 3626 - DNA, 17 bp, Homo sapiens
gcttccagtgcaacagc

SEQ ID NO: 3627 - DNA, 17 bp, Homo sapiens
gctgttgcactggaagc

SEQ ID NO: 3628 - DNA, 121 bp, Homo sapiens
gaggcctcctgcccggtgctcacctgtggtcccgccagcttccagtgcaacagctccacctgcatcccccagctgtgggcctgcgacaacgaccccgactgcgaagatggctcggatgagt

SEQ ID NO: 3629 - DNA, 121 bp, Homo sapiens
actcatccgagccatcttcgcagtcggggtcgttgtcgcaggcccacagctgggggatgcaggtggagctgttgcactggaagctggcgggaccacaggtgagcaccgggcaggaggcctc

SEQ ID NO: 3630 - DNA, 17 bp, Homo sapiens
gctccacctgcatcccc

SEQ ID NO: 3631 - DNA, 17 bp, Homo sapiens
ggggatgcaggtggagc

SEQ ID NO: 3632 - DNA, 121 bp, Homo sapiens
aggcctcctgcccggtgctcacctgtggtcccgccagcttccagtgcaacagctccacctgcatcccccagctgtgggcctgcgacaacgaccccgactgcgaagatggctcggatgagtg

SEQ ID NO: 3633 - DNA, 121 bp, Homo sapiens
cactcatccgagccatcttcgcagtcggggtcgttgtcgcaggcccacagctgggggatgcaggtggagctgttgcactggaagctggcgggaccacaggtgagcaccgggcaggaggcct

SEQ ID NO: 3634 - DNA, 17 bp, Homo sapiens
ctccacctgcatccccc

SEQ ID NO: 3635 - DNA, 17 bp, Homo sapiens
gggggatgcaggtggag

SEQ ID NO: 3636 - DNA, 121 bp, Homo sapiens
ctgtggtcccgccagcttccagtgcaacagctccacctgcatcccccagctgtgggcctgcgacaacgaccccgactgcgaagatggctcggatgagtggccgcagcgctgtaggggtctt

SEQ ID NO: 3637 - DNA, 121 bp, Homo sapiens
aagacccctacagcgctgcggccactcatccgagccatcttcgcagtcggggtcgttgtcgcaggcccacagctgggggatgcaggtggagctgttgcactggaagctggcgggaccacag

SEQ ID NO: 3638 - DNA, 17 bp, Homo sapiens
tgggcctgcgacaacga

SEQ ID NO: 3639 - DNA, 17 bp, Homo sapiens
tcgttgtcgcaggccca

SEQ ID NO: 3640 - DNA, 121 bp, Homo sapiens
tgtggtcccgccagcttccagtgcaacagctccacctgcatcccccagctgtgggcctgcgacaacgaccccgactgcgaagatggctcggatgagtggccgcagcgctgtaggggtcttt

SEQ ID NO: 3641 - DNA, 121 bp, Homo sapiens
aaagacccctacagcgctgcggccactcatccgagccatcttcgcagtcggggtcgttgtcgcaggcccacagctgggggatgcaggtggagctgttgcactggaagctggcgggaccaca

SEQ ID NO: 3642 - DNA, 17 bp, Homo sapiens
gggcctgcgacaacgac

SEQ ID NO: 3643 - DNA, 17 bp, Homo sapiens
gtcgttgtcgcaggccc

SEQ ID NO: 3644 - DNA, 121 bp, Homo sapiens; identical to SEQ ID NO: 3640

SEQ ID NO: 3645 - DNA, 121 bp, Homo sapiens; identical to SEQ ID NO: 3641

SEQ ID NO: 3646 - DNA, 17 bp, Homo sapiens
gggcctgcgacaacgac

SEQ ID NO: 3647 - DNA, 17 bp, Homo sapiens
gtcgttgtcgcaggccc

SEQ ID NO: 3648 - DNA, 121 bp, Homo sapiens; identical to SEQ ID NO: 3640

SEQ ID NO: 3649 - DNA, 121 bp, Homo sapiens; identical to SEQ ID NO: 3641

SEQ ID NO: 3650 - DNA, 17 bp, Homo sapiens
gggcctgcgacaacgac

SEQ ID NO: 3651 - DNA, 17 bp, Homo sapiens
gtcgttgtcgcaggccc

SEQ ID NO: 3652 - DNA, 121 bp, Homo sapiens
ttccagtgcaacagctccacctgcatcccccagctgtgggcctgcgacaacgaccccgactgcgaagatggctcggatgagtggccgcagcgctgtaggggtctttacgtgttccaagggg

SEQ ID NO: 3653 - DNA, 121 bp, Homo sapiens
ccccttggaacacgtaaagacccctacagcgctgcggccactcatccgagccatcttcgcagtcggggtcgttgtcgcaggcccacagctgggggatgcaggtggagctgttgcactggaa

SEQ ID NO: 3654 - DNA, 17 bp, Homo sapiens
accccgactgcgaagat

SEQ ID NO: 3655 - DNA, 17 bp, Homo sapiens
atcttcgcagtcggggt

SEQ ID NO: 3656 - DNA, 121 bp, Homo sapiens; identical to SEQ ID NO: 3652

SEQ ID NO: 3657 - DNA, 121 bp, Homo sapiens; identical to SEQ ID NO: 3653

SEQ ID NO: 3658 - DNA, 17 bp, Homo sapiens
accccgactgcgaagat

SEQ ID NO: 3659 - DNA, 17 bp, Homo sapiens
atcttcgcagtcggggt

SEQ ID NO: 3660 - DNA, 121 bp, Homo sapiens
ccagtgcaacagctccacctgcatcccccagctgtgggcctgcgacaacgaccccgactgcgaagatggctcggatgagtggccgcagcgctgtaggggtctttacgtgttccaaggggac

SEQ ID NO: 3661 - DNA, 121 bp, Homo sapiens
gtccccttggaacacgtaaagacccctacagcgctgcggccactcatccgagccatcttcgcagtcggggtcgttgtcgcaggcccacagctgggggatgcaggtggagctgttgcactgg

SEQ ID NO: 3662 - DNA, 17 bp, Homo sapiens
cccgactgcgaagatgg

SEQ ID NO: 3663 - DNA, 17 bp, Homo sapiens
ccatcttcgcagtcggg

SEQ ID NO: 3664 - DNA, 121 bp, Homo sapiens
tgcaacagctccacctgcatcccccagctgtgggcctgcgacaacgaccccgactgcgaagatggctcggatgagtggccgcagcgctgtaggggtctttacgtgttccaaggggacagta

SEQ ID NO: 3665 - DNA, 121 bp, Homo sapiens
tactgtccccttggaacacgtaaagacccctacagcgctgcggccactcatccgagccatcttcgcagtcggggtcgttgtcgcaggcccacagctgggggatgcaggtggagctgttgca

SEQ ID NO: 3666 - DNA, 17 bp, Homo sapiens
actgcgaagatggctcg

SEQ ID NO: 3667 - DNA, 17 bp, Homo sapiens
cgagccatcttcgcagt

SEQ ID NO: 3668 - DNA, 121 bp, Homo sapiens
gctccacctgcatcccccagctgtgggcctgcgacaacgaccccgactgcgaagatggctcggatgagtggccgcagcgctgtaggggtctttacgtgttccaaggggacagtagcccctg

SEQ ID NO: 3669 - DNA, 121 bp, Homo sapiens
caggggctactgtccccttggaacacgtaaagacccctacagcgctgcggccactcatccgagccatcttcgcagtcggggtcgttgtcgcaggcccacagctgggggatgcaggtggagc

SEQ ID NO: 3670 - DNA, 17 bp, Homo sapiens
agatggctcggatgagt

SEQ ID NO: 3671 - DNA, 17 bp, Homo sapiens
actcatccgagccatct

SEQ ID NO: 3672 - DNA, 121 bp, Homo sapiens
tgtgggcctgcgacaacgaccccgactgcgaagatggctcggatgagtggccgcagcgctgtaggggtctttacgtgttccaaggggacagtagcccctgctcggccttcgagttccactg

SEQ ID NO: 3673 - DNA, 121 bp, Homo sapiens
cagtggaactcgaaggccgagcaggggctactgtccccttggaacacgtaaagacccctacagcgctgcggccactcatccgagccatcttcgcagtcggggtcgttgtcgcaggcccaca

SEQ ID NO: 3674 - DNA, 17 bp, Homo sapiens
gcagcgctgtaggggtc

SEQ ID NO: 3675 - DNA, 17 bp, Homo sapiens
gacccctacagcgctgc

SEQ ID NO: 3676 - DNA, 121 bp, Homo sapiens
caacgaccccgactgcgaagatggctcggatgagtggccgcagcgctgtaggggtctttacgtgttccaaggggacagtagcccctgctcggccttcgagttccactgcctaagtggcgag

SEQ ID NO: 3677 - DNA, 121 bp, Homo sapiens
ctcgccacttaggcagtggaactcgaaggccgagcaggggctactgtccccttggaacacgtaaagacccctacagcgctgcggccactcatccgagccatcttcgcagtcggggtcgttg

SEQ ID NO: 3678 - DNA, 17 bp, Homo sapiens
ggtctttacgtgttcca

SEQ ID NO: 3679 - DNA, 17 bp, Homo sapiens
tggaacacgtaaagacc

SEQ ID NO: 3680 - DNA, 121 bp, Homo sapiens
cccgactgcgaagatggctcggatgagtggccgcagcgctgtaggggtctttacgtgttccaaggggacagtagcccctgctcggccttcgagttccactgcctaagtggcgagtgcatcc

SEQ ID NO: 3681 - DNA, 121 bp, Homo sapiens
ggatgcactcgccacttaggcagtggaactcgaaggccgagcaggggctactgtccccttggaacacgtaaagacccctacagcgctgcggccactcatccgagccatcttcgcagtcggg

SEQ ID NO: 3682 - DNA, 17 bp, Homo sapiens
acgtgttccaaggggac

SEQ ID NO: 3683 - DNA, 17 bp, Homo sapiens
gtccccttggaacacgt

SEQ ID NO: 3684 - DNA, 121 bp, Homo sapiens
cggatgagtggccgcagcgctgtaggggtctttacgtgttccaaggggacagtagcccctgctcggccttcgagttccactgcctaagtggcgagtgcatccactccagctggcgctgtga

SEQ ID NO: 3685 - DNA, 121 bp, Homo sapiens
tcacagcgccagctggagtggatgcactcgccacttaggcagtggaactcgaaggccgagcaggggctactgtccccttggaacacgtaaagacccctacagcgctgcggccactcatccg

SEQ ID NO: 3686 - DNA, 17 bp, Homo sapiens
tagcccctgctcggcct

SEQ ID NO: 3687 - DNA, 17 bp, Homo sapiens
aggccgagcaggggcta

SEQ ID NO: 3688 - DNA, 121 bp, Homo sapiens; identical to SEQ ID NO: 3684

SEQ ID NO: 3689 - DNA, 121 bp, Homo sapiens; identical to SEQ ID NO: 3685

SEQ ID NO: 3690 - DNA, 17 bp, Homo sapiens
tagcccctgctcggcct

SEQ ID NO: 3691 - DNA, 17 bp, Homo sapiens
aggccgagcaggggcta

SEQ ID NO: 3692 - DNA, 121 bp, Homo sapiens
atgagtggccgcagcgctgtaggggtctttacgtgttccaaggggacagtagcccctgctcggccttcgagttccactgcctaagtggcgagtgcatccactccagctggcgctgtgatgg

SEQ ID NO: 3693 - DNA, 121 bp, Homo sapiens
ccatcacagcgccagctggagtggatgcactcgccacttaggcagtggaactcgaaggccgagcaggggctactgtccccttggaacacgtaaagacccctacagcgctgcggccactcat

SEQ ID NO: 3694 - DNA, 17 bp, Homo sapiens
cccctgctcggccttcg

SEQ ID NO: 3695 - DNA, 17 bp, Homo sapiens
cgaaggccgagcagggg

SEQ ID NO: 3696 - DNA, 121 bp, Homo sapiens
tacgtgttccaaggggacagtagcccctgctcggccttcgagttccactgcctaagtggcgagtgcatccactccagctggcgctgtgatggtggccccgactgcaaggacaaatctgacg

SEQ ID NO: 3697 - DNA, 121 bp, Homo sapiens
cgtcagatttgtccttgcagtcggggccaccatcacagcgccagctggagtggatgcactcgccacttaggcagtggaactcgaaggccgagcaggggctactgtccccttggaacacgta

SEQ ID NO: 3698 - DNA, 17 bp, Homo sapiens
taagtggcgagtgcatc

SEQ ID NO: 3699 - DNA, 17 bp, Homo sapiens
gatgcactcgccactta

SEQ ID NO: 3700 - DNA, 121 bp, Homo sapiens
caaggggacagtagcccctgctcggccttcgagttccactgcctaagtggcgagtgcatccactccagctggcgctgtgatggtggccccgactgcaaggacaaatctgacgaggaaaact

SEQ ID NO: 3701 - DNA, 121 bp, Homo sapiens
agttttcctcgtcagatttgtccttgcagtcggggccaccatcacagcgccagctggagtggatgcactcgccacttaggcagtggaactcgaaggccgagcaggggctactgtccccttg

SEQ ID NO: 3702 - DNA, 17 bp, Homo sapiens
agtgcatccactccagc

SEQ ID NO: 3703 - DNA, 17 bp, Homo sapiens
gctggagtggatgcact

SEQ ID NO: 3704 - DNA, 121 bp, Homo sapiens
ccttcgagttccactgcctaagtggcgagtgcatccactccagctggcgctgtgatggtggccccgactgcaaggacaaatctgacgaggaaaactgcggtatgggcggggccagggtggg

SEQ ID NO: 3705 - DNA, 121 bp, Homo sapiens
cccaccctggccccgcccataccgcagttttcctcgtcagatttgtccttgcagtcggggccaccatcacagcgccagctggagtggatgcactcgccacttaggcagtggaactcgaagg

SEQ ID NO: 3706 - DNA, 17 bp, Homo sapiens
tgatggtggccccgact

SEQ ID NO: 3707 - DNA, 17 bp, Homo sapiens
agtcggggccaccatca

SEQ ID NO: 3708 - DNA, 121 bp, Homo sapiens
gagttccactgcctaagtggcgagtgcatccactccagctggcgctgtgatggtggccccgactgcaaggacaaatctgacgaggaaaactgcggtatgggcggggccagggtgggggcgg

SEQ ID NO: 3709 - DNA, 121 bp, Homo sapiens
ccgcccccaccctggccccgcccataccgcagttttcctcgtcagatttgtccttgcagtcggggccaccatcacagcgccagctggagtggatgcactcgccacttaggcagtggaactc

SEQ ID NO: 3710 - DNA, 17 bp, Homo sapiens
gtggccccgactgcaag

SEQ ID NO: 3711 - DNA, 17 bp, Homo sapiens
cttgcagtcggggccac

SEQ ID NO: 3712 - DNA, 121 bp, Homo sapiens
agttccactgcctaagtggcgagtgcatccactccagctggcgctgtgatggtggccccgactgcaaggacaaatctgacgaggaaaactgcggtatgggcggggccagggtgggggcggg

SEQ ID NO: 3713 - DNA, 121 bp, Homo sapiens
cccgcccccaccctggccccgcccataccgcagttttcctcgtcagatttgtccttgcagtcggggccaccatcacagcgccagctggagtggatgcactcgccacttaggcagtggaact

SEQ ID NO: 3714 - DNA, 17 bp, Homo sapiens
tggccccgactgcaagg

SEQ ID NO: 3715 - DNA, 17 bp, Homo sapiens
ccttgcagtcggggcca

SEQ ID NO: 3716 - DNA, 121 bp, Homo sapiens; identical to SEQ ID NO: 3708

SEQ ID NO: 3717 - DNA, 121 bp, Homo sapiens; identical to SEQ ID NO: 3709

SEQ ID NO: 3718 - DNA, 17 bp, Homo sapiens
gtggccccgactgcaag

SEQ ID NO: 3719 - DNA, 17 bp, Homo sapiens
cttgcagtcggggccac

SEQ ID NO: 3720 - DNA, 121 bp, Homo sapiens
ccactgcctaagtggcgagtgcatccactccagctggcgctgtgatggtggccccgactgcaaggacaaatctgacgaggaaaactgcggtatgggcggggccagggtgggggcggggcgt

SEQ ID NO: 3721 - DNA, 121 bp, Homo sapiens
acgccccgcccccaccctggccccgcccataccgcagttttcctcgtcagatttgtccttgcagtcggggccaccatcacagcgccagctggagtggatgcactcgccacttaggcagtgg

SEQ ID NO: 3722 - DNA, 17 bp, Homo sapiens
cccgactgcaaggacaa

SEQ ID NO: 3723 - DNA, 17 bp, Homo sapiens
ttgtccttgcagtcggg

SEQ ID NO: 3724 - DNA, 121 bp, Homo sapiens
tccactgcctaagtggcgagtgcatccactccagctggcgctgtgatggtggccccgactgcaaggacaaatctgacgaggaaaactgcggtatgggcggggccagggtgggggcggggcg

SEQ ID NO: 3725 - DNA, 121 bp, Homo sapiens
cgccccgcccccaccctggccccgcccataccgcagttttcctcgtcagatttgtccttgcagtcggggccaccatcacagcgccagctggagtggatgcactcgccacttaggcagtgga

SEQ ID NO: 3726 - DNA, 17 bp, Homo sapiens
ccccgactgcaaggaca

SEQ ID NO: 3727 - DNA, 17 bp, Homo sapiens
tgtccttgcagtcgggg

SEQ ID NO: 3728 - DNA, 121 bp, Homo sapiens
tgcctaagtggcgagtgcatccactccagctggcgctgtgatggtggccccgactgcaaggacaaatctgacgaggaaaactgcggtatgggcggggccagggtgggggcggggcgtccta

SEQ ID NO: 3729 - DNA, 121 bp, Homo sapiens
taggacgccccgcccccaccctggccccgcccataccgcagttttcctcgtcagatttgtccttgcagtcggggccaccatcacagcgccagctggagtggatgcactcgccacttaggca

SEQ ID NO: 3730 - DNA, 17 bp, Homo sapiens
actgcaaggacaaatct

SEQ ID NO: 3731 - DNA, 17 bp, Homo sapiens
agatttgtccttgcagt

SEQ ID NO: 3732 - DNA, 121 bp, Homo sapiens
gcctaagtggcgagtgcatccactccagctggcgctgtgatggtggccccgactgcaaggacaaatctgacgaggaaaactgcggtatgggcggggccagggtgggggcggggcgtcctat

SEQ ID NO: 3733 - DNA, 121 bp, Homo sapiens
ataggacgccccgcccccaccctggccccgcccataccgcagttttcctcgtcagatttgtccttgcagtcggggccaccatcacagcgccagctggagtggatgcactcgccacttaggc

SEQ ID NO: 3734 - DNA, 17 bp, Homo sapiens
ctgcaaggacaaatctg

SEQ ID NO: 3735 - DNA, 17 bp, Homo sapiens
cagatttgtccttgcag

SEQ ID NO: 3736 - DNA, 121 bp, Homo sapiens; identical to SEQ ID NO: 3732

SEQ ID NO: 3737 - DNA, 121 bp, Homo sapiens; identical to SEQ ID NO: 3733

SEQ ID NO: 3738 - DNA, 17 bp, Homo sapiens
ctgcaaggacaaatctg

SEQ ID NO: 3739 - DNA, 17 bp, Homo sapiens
cagatttgtccttgcag

SEQ ID NO: 3740 - DNA, 121 bp, Homo sapiens
agtggcgagtgcatccactccagctggcgctgtgatggtggccccgactgcaaggacaaatctgacgaggaaaactgcggtatgggcggggccagggtgggggcggggcgtcctatcacct

SEQ ID NO: 3741 - DNA, 121 bp, Homo sapiens
aggtgataggacgccccgcccccaccctggccccgcccataccgcagttttcctcgtcagatttgtccttgcagtcggggccaccatcacagcgccagctggagtggatgcactcgccact

SEQ ID NO: 3742 - DNA, 17 bp, Homo sapiens
aggacaaatctgacgag

SEQ ID NO: 3743 - DNA, 17 bp, Homo sapiens
ctcgtcagatttgtcct

SEQ ID NO: 3744 - DNA, 121 bp, Homo sapiens
cgagtgcatccactccagctggcgctgtgatggtggccccgactgcaaggacaaatctgacgaggaaaactgcggtatgggcggggccagggtgggggcggggcgtcctatcacctgtccc

SEQ ID NO: 3745 - DNA, 121 bp, Homo sapiens
gggacaggtgataggacgccccgcccccaccctggccccgcccataccgcagttttcctcgtcagatttgtccttgcagtcggggccaccatcacagcgccagctggagtggatgcactcg

SEQ ID NO: 3746 - DNA, 17 bp, Homo sapiens
aaatctgacgaggaaaa

SEQ ID NO: 3747 - DNA, 17 bp, Homo sapiens
ttttcctcgtcagattt

SEQ ID NO: 3748 - DNA, 121 bp, Homo sapiens
gagtgcatccactccagctggcgctgtgatggtggccccgactgcaaggacaaatctgacgaggaaaactgcggtatgggcggggccagggtgggggcggggcgtcctatcacctgtccct

SEQ ID NO: 3749 - DNA, 121 bp, Homo sapiens
agggacaggtgataggacgccccgcccccaccctggccccgcccataccgcagttttcctcgtcagatttgtccttgcagtcggggccaccatcacagcgccagctggagtggatgcactc

SEQ ID NO: 3750 - DNA, 17 bp, Homo sapiens
aatctgacgaggaaaac

SEQ ID NO: 3751 - DNA, 17 bp, Homo sapiens
gttttcctcgtcagatt

SEQ ID NO: 3752 - DNA, 121 bp, Homo sapiens; identical to SEQ ID NO: 3748

SEQ ID NO: 3753 - DNA, 121 bp, Homo sapiens; identical to SEQ ID NO: 3749

SEQ ID NO: 3754 - DNA, 17 bp, Homo sapiens
aatctgacgaggaaaac

SEQ ID NO: 3755 - DNA, 17 bp, Homo sapiens
gttttcctcgtcagatt

SEQ ID NO: 3756 - DNA, 121 bp, Homo sapiens; identical to SEQ ID NO: 3748

SEQ ID NO: 3757 - DNA, 121 bp, Homo sapiens; identical to SEQ ID NO: 3749

SEQ ID NO: 3758 - DNA, 17 bp, Homo sapiens
aatctgacgaggaaaac

SEQ ID NO: 3759 - DNA, 17 bp, Homo sapiens
gttttcctcgtcagatt

SEQ ID NO: 3760 - DNA, 121 bp, Homo sapiens
tcttgagaaaatcaacacactctgtcctgttttccagctgtggccacctgtcgccctgacgaattccagtgctctgatggaaactgcatccatggcagccggcagtgtgaccgggaatatg

SEQ ID NO: 3761 - DNA, 121 bp, Homo sapiens
catattcccggtcacactgccggctgccatggatgcagtttccatcagagcactggaattcgtcagggcgacaggtggccacagctggaaaacaggacagagtgtgttgattttctcaaga

SEQ ID NO: 3762 - DNA, 17 bp, Homo sapiens
gccctgacgaattccag

SEQ ID NO: 3763 - DNA, 17 bp, Homo sapiens
ctggaattcgtcagggc

SEQ ID NO: 3764 - DNA, 121 bp, Homo sapiens
gaaaatcaacacactctgtcctgttttccagctgtggccacctgtcgccctgacgaattccagtgctctgatggaaactgcatccatggcagccggcagtgtgaccgggaatatgactgca

SEQ ID NO: 3765 - DNA, 121 bp, Homo sapiens
tgcagtcatattcccggtcacactgccggctgccatggatgcagtttccatcagagcactggaattcgtcagggcgacaggtggccacagctggaaaacaggacagagtgtgttgattttc

SEQ ID NO: 3766 - DNA, 17 bp, Homo sapiens
acgaattccagtgctct

SEQ ID NO: 3767 - DNA, 17 bp, Homo sapiens
agagcactggaattcgt

SEQ ID NO: 3768 - DNA, 121 bp, Homo sapiens
cctgttttccagctgtggccacctgtcgccctgacgaattccagtgctctgatggaaactgcatccatggcagccggcagtgtgaccgggaatatgactgcaaggacatgagcgatgaagt

SEQ ID NO: 3769 - DNA, 121 bp, Homo sapiens
acttcatcgctcatgtccttgcagtcatattcccggtcacactgccggctgccatggatgcagtttccatcagagcactggaattcgtcagggcgacaggtggccacagctggaaaacagg

SEQ ID NO: 3770 - DNA, 17 bp, Homo sapiens
tggaaactgcatccatg

SEQ ID NO: 3771 - DNA, 17 bp, Homo sapiens
catggatgcagtttcca

SEQ ID NO: 3772 - DNA, 121 bp, Homo sapiens
tcgccctgacgaattccagtgctctgatggaaactgcatccatggcagccggcagtgtgaccgggaatatgactgcaaggacatgagcgatgaagttggctgcgttaatggtgagcgctgg

SEQ ID NO: 3773 - DNA, 121 bp, Homo sapiens
ccagcgctcaccattaacgcagccaacttcatcgctcatgtccttgcagtcatattcccggtcacactgccggctgccatggatgcagtttccatcagagcactggaattcgtcagggcga

SEQ ID NO: 3774 - DNA, 17 bp, Homo sapiens
cagtgtgaccgggaata

SEQ ID NO: 3775 - DNA, 17 bp, Homo sapiens
tattcccggtcacactg

SEQ ID NO: 3776 - DNA, 121 bp, Homo sapiens
gtcgccctgacgaattccagtgctctgatggaaactgcatccatggcagccggcagtgtgaccgggaatatgactgcaaggacatgagcgatgaagttggctgcgttaatggtgagcgctg

SEQ ID NO: 3777 - DNA, 121 bp, Homo sapiens
cagcgctcaccattaacgcagccaacttcatcgctcatgtccttgcagtcatattcccggtcacactgccggctgccatggatgcagtttccatcagagcactggaattcgtcagggcgac

SEQ ID NO: 3778 - DNA, 17 bp, Homo sapiens
gcagtgtgaccgggaat

SEQ ID NO: 3779 - DNA, 17 bp, Homo sapiens
attcccggtcacactgc

SEQ ID NO: 3780 - DNA, 121 bp, Homo sapiens
cctgacgaattccagtgctctgatggaaactgcatccatggcagccggcagtgtgaccgggaatatgactgcaaggacatgagcgatgaagttggctgcgttaatggtgagcgctggccat

SEQ ID NO: 3781 - DNA, 121 bp, Homo sapiens
atggccagcgctcaccattaacgcagccaacttcatcgctcatgtccttgcagtcatattcccggtcacactgccggctgccatggatgcagtttccatcagagcactggaattcgtcagg

SEQ ID NO: 3782 - DNA, 17 bp, Homo sapiens
gtgaccgggaatatgac

SEQ ID NO: 3783 - DNA, 17 bp, Homo sapiens
gtcatattcccggtcac

SEQ ID NO: 3784 - DNA, 121 bp, Homo sapiens
tccagtgctctgatggaaactgcatccatggcagccggcagtgtgaccgggaatatgactgcaaggacatgagcgatgaagttggctgcgttaatggtgagcgctggccatctggttttcc

SEQ ID NO: 3785 - DNA, 121 bp, Homo sapiens
ggaaaaccagatggccagcgctcaccattaacgcagccaacttcatcgctcatgtccttgcagtcatattcccggtcacactgccggctgccatggatgcagtttccatcagagcactgga

SEQ ID NO: 3786 - DNA, 17 bp, Homo sapiens
atatgactgcaaggaca

SEQ ID NO: 3787 - DNA, 17 bp, Homo sapiens
tgtccttgcagtcatat

SEQ ID NO: 3788 - DNA, 121 bp, Homo sapiens
aaactgcatccatggcagccggcagtgtgaccgggaatatgactgcaaggacatgagcgatgaagttggctgcgttaatggtgagcgctggccatctggttttccatcccccattctctgt

SEQ ID NO: 3789 - DNA, 121 bp, Homo sapiens
acagagaatgggggatggaaaaccagatggccagcgctcaccattaacgcagccaacttcatcgctcatgtccttgcagtcatattcccggtcacactgccggctgccatggatgcagttt

SEQ ID NO: 3790 - DNA, 17 bp, Homo sapiens
atgagcgatgaagttgg

SEQ ID NO: 3791 - DNA, 17 bp, Homo sapiens
ccaacttcatcgctcat

SEQ ID NO: 3792 - DNA, 121 bp, Homo sapiens
atggcagccggcagtgtgaccgggaatatgactgcaaggacatgagcgatgaagttggctgcgttaatggtgagcgctggccatctggttttccatcccccattctctgtgccttgctgct

SEQ ID NO: 3793 - DNA, 121 bp, Homo sapiens
agcagcaaggcacagagaatgggggatggaaaaccagatggccagcgctcaccattaacgcagccaacttcatcgctcatgtccttgcagtcatattcccggtcacactgccggctgccat

SEQ ID NO: 3794 - DNA, 17 bp, Homo sapiens
agttggctgcgttaatg

SEQ ID NO: 3795 - DNA, 17 bp, Homo sapiens
cattaacgcagccaact

SEQ ID NO: 3796 - DNA, 121 bp, Homo sapiens
aggctcagacacacctgaccttcctccttcctctctctggctctcacagtgacactctgcgagggacccaacaagttcaagtgtcacagcggcgaatgcatcaccctggacaaagtctgca

SEQ ID NO: 3797 - DNA, 121 bp, Homo sapiens
tgcagactttgtccagggtgatgcattcgccgctgtgacacttgaacttgttgggtccctcgcagagtgtcactgtgagagccagagagaggaaggaggaaggtcaggtgtgtctgagcct

SEQ ID NO: 3798 - DNA, 17 bp, Homo sapiens
cactctgcgagggaccc

SEQ ID NO: 3799 - DNA, 17 bp, Homo sapiens
gggtccctcgcagagtg

SEQ ID NO: 3800 - DNA, 121 bp, Homo sapiens
cctctctctggctctcacagtgacactctgcgagggacccaacaagttcaagtgtcacagcggcgaatgcatcaccctggacaaagtctgcaacatggctagagactgccgggactggtca

SEQ ID NO: 3801 - DNA, 121 bp, Homo sapiens
tgaccagtcccggcagtctctagccatgttgcagactttgtccagggtgatgcattcgccgctgtgacacttgaacttgttgggtccctcgcagagtgtcactgtgagagccagagagagg

SEQ ID NO: 3802 - DNA, 17 bp, Homo sapiens
tgtcacagcggcgaatg

SEQ ID NO: 3803 - DNA, 17 bp, Homo sapiens
cattcgccgctgtgaca

SEQ ID NO: 3804 - DNA, 121 bp, Homo sapiens
tctctggctctcacagtgacactctgcgagggacccaacaagttcaagtgtcacagcggcgaatgcatcaccctggacaaagtctgcaacatggctagagactgccgggactggtcagatg

SEQ ID NO: 3805 - DNA, 121 bp, Homo sapiens
catctgaccagtcccggcagtctctagccatgttgcagactttgtccagggtgatgcattcgccgctgtgacacttgaacttgttgggtccctcgcagagtgtcactgtgagagccagaga

SEQ ID NO: 3806 - DNA, 17 bp, Homo sapiens
acagcggcgaatgcatc

SEQ ID NO: 3807 - DNA, 17 bp, Homo sapiens
gatgcattcgccgctgt

SEQ ID NO: 3808 - DNA, 121 bp, Homo sapiens; identical to SEQ ID NO: 3804

SEQ ID NO: 3809 - DNA, 121 bp, Homo sapiens; identical to SEQ ID NO: 3805

SEQ ID NO: 3810 - DNA, 17 bp, Homo sapiens
acagcggcgaatgcatc

SEQ ID NO: 3811 - DNA, 17 bp, Homo sapiens
gatgcattcgccgctgt

SEQ ID NO: 3812 - DNA, 121 bp, Homo sapiens
acactctgcgagggacccaacaagttcaagtgtcacagcggcgaatgcatcaccctggacaaagtctgcaacatggctagagactgccgggactggtcagatgaacccatcaaagagtgcg

SEQ ID NO: 3813 - DNA, 121 bp, Homo sapiens
cgcactctttgatgggttcatctgaccagtcccggcagtctctagccatgttgcagactttgtccagggtgatgcattcgccgctgtgacacttgaacttgttgggtccctcgcagagtgt

SEQ ID NO: 3814 - DNA, 17 bp, Homo sapiens
ccctggacaaagtctgc

SEQ ID NO: 3815 - DNA, 17 bp, Homo sapiens
gcagactttgtccaggg

SEQ ID NO: 3816 - DNA, 121 bp, Homo sapiens
cgagggacccaacaagttcaagtgtcacagcggcgaatgcatcaccctggacaaagtctgcaacatggctagagactgccgggactggtcagatgaacccatcaaagagtgcggtgagtct

SEQ ID NO: 3817 - DNA, 121 bp, Homo sapiens
agactcaccgcactctttgatgggttcatctgaccagtcccggcagtctctagccatgttgcagactttgtccagggtgatgcattcgccgctgtgacacttgaacttgttgggtccctcg

SEQ ID NO: 3818 - DNA, 17 bp, Homo sapiens
aaagtctgcaacatggc

SEQ ID NO: 3819 - DNA, 17 bp, Homo sapiens
gccatgttgcagacttt

SEQ ID NO: 3820 - DNA, 121 bp, Homo sapiens
agttcaagtgtcacagcggcgaatgcatcaccctggacaaagtctgcaacatggctagagactgccgggactggtcagatgaacccatcaaagagtgcggtgagtctcggtgcaggcggct

SEQ ID NO: 3821 - DNA, 121 bp, Homo sapiens
agccgcctgcaccgagactcaccgcactctttgatgggttcatctgaccagtcccggcagtctctagccatgttgcagactttgtccagggtgatgcattcgccgctgtgacacttgaact

SEQ ID NO: 3822 - DNA, 17 bp, Homo sapiens
ggctagagactgccggg

SEQ ID NO: 3823 - DNA, 17 bp, Homo sapiens
cccggcagtctctagcc

SEQ ID NO: 3824 - DNA, 121 bp, Homo sapiens
tcaagtgtcacagcggcgaatgcatcaccctggacaaagtctgcaacatggctagagactgccgggactggtcagatgaacccatcaaagagtgcggtgagtctcggtgcaggcggcttgc

SEQ ID NO: 3825 - DNA, 121 bp, Homo sapiens
gcaagccgcctgcaccgagactcaccgcactctttgatgggttcatctgaccagtcccggcagtctctagccatgttgcagactttgtccagggtgatgcattcgccgctgtgacacttga

SEQ ID NO: 3826 - DNA, 17 bp, Homo sapiens
tagagactgccgggact

SEQ ID NO: 3827 - DNA, 17 bp, Homo sapiens
agtcccggcagtctcta

SEQ ID NO: 3828 - DNA, 121 bp, Homo sapiens
tgtcacagcggcgaatgcatcaccctggacaaagtctgcaacatggctagagactgccgggactggtcagatgaacccatcaaagagtgcggtgagtctcggtgcaggcggcttgcagagt

SEQ ID NO: 3829 - DNA, 121 bp, Homo sapiens
actctgcaagccgcctgcaccgagactcaccgcactctttgatgggttcatctgaccagtcccggcagtctctagccatgttgcagactttgtccagggtgatgcattcgccgctgtgaca

SEQ ID NO: 3830 - DNA, 17 bp, Homo sapiens
actgccgggactggtca

SEQ ID NO: 3831 - DNA, 17 bp, Homo sapiens
tgaccagtcccggcagt

SEQ ID NO: 3832 - DNA, 121 bp, Homo sapiens
tcacagcggcgaatgcatcaccctggacaaagtctgcaacatggctagagactgccgggactggtcagatgaacccatcaaagagtgcggtgagtctcggtgcaggcggcttgcagagttt

SEQ ID NO: 3833 - DNA, 121 bp, Homo sapiens
aaactctgcaagccgcctgcaccgagactcaccgcactctttgatgggttcatctgaccagtcccggcagtctctagccatgttgcagactttgtccagggtgatgcattcgccgctgtga

SEQ ID NO: 3834 - DNA, 17 bp, Homo sapiens
tgccgggactggtcaga

SEQ ID NO: 3835 - DNA, 17 bp, Homo sapiens
tctgaccagtcccggca

SEQ ID NO: 3836 - DNA, 121 bp, Homo sapiens; identical to SEQ ID NO: 3828

SEQ ID NO: 3837 - DNA, 121 bp, Homo sapiens; identical to SEQ ID NO: 3829

SEQ ID NO: 3838 - DNA, 17 bp, Homo sapiens
actgccgggactggtca

SEQ ID NO: 3839 - DNA, 17 bp, Homo sapiens
tgaccagtcccggcagt

SEQ ID NO: 3840 - DNA, 121 bp, Homo sapiens
cagcggcgaatgcatcaccctggacaaagtctgcaacatggctagagactgccgggactggtcagatgaacccatcaaagagtgcggtgagtctcggtgcaggcggcttgcagagtttgtg

SEQ ID NO: 3841 - DNA, 121 bp, Homo sapiens
cacaaactctgcaagccgcctgcaccgagactcaccgcactctttgatgggttcatctgaccagtcccggcagtctctagccatgttgcagactttgtccagggtgatgcattcgccgctg

SEQ ID NO: 3842 - DNA, 17 bp, Homo sapiens
cgggactggtcagatga

SEQ ID NO: 3843 - DNA, 17 bp, Homo sapiens
tcatctgaccagtcccg

SEQ ID NO: 3844 - DNA, 121 bp, Homo sapiens
gcggcgaatgcatcaccctggacaaagtctgcaacatggctagagactgccgggactggtcagatgaacccatcaaagagtgcggtgagtctcggtgcaggcggcttgcagagtttgtggg

SEQ ID NO: 3845 - DNA, 121 bp, Homo sapiens
cccacaaactctgcaagccgcctgcaccgagactcaccgcactctttgatgggttcatctgaccagtcccggcagtctctagccatgttgcagactttgtccagggtgatgcattcgccgc

SEQ ID NO: 3846 - DNA, 17 bp, Homo sapiens
ggactggtcagatgaac

SEQ ID NO: 3847 - DNA, 17 bp, Homo sapiens
gttcatctgaccagtcc

SEQ ID NO: 3848 - DNA, 121 bp, Homo sapiens
ccctggacaaagtctgcaacatggctagagactgccgggactggtcagatgaacccatcaaagagtgcggtgagtctcggtgcaggcggcttgcagagtttgtggggagccaggaaaggga

SEQ ID NO: 3849 - DNA, 121 bp, Homo sapiens
tccctttcctggctccccacaaactctgcaagccgcctgcaccgagactcaccgcactctttgatgggttcatctgaccagtcccggcagtctctagccatgttgcagactttgtccaggg

SEQ ID NO: 3850 - DNA, 17 bp, Homo sapiens
acccatcaaagagtgcg

SEQ ID NO: 3851 - DNA, 17 bp, Homo sapiens
cgcactctttgatgggt

SEQ ID NO: 3852 - DNA, 121 bp, Homo sapiens
gggtaggggcccgagagtgaccagtctgcatcccctggccctgcgcagggaccaacgaatgcttggacaacaacggcggctgttcccacgtctgcaatgaccttaagatcggctacgagtg

SEQ ID NO: 3853 - DNA, 121 bp, Homo sapiens
cactcgtagccgatcttaaggtcattgcagacgtgggaacagccgccgttgttgtccaagcattcgttggtccctgcgcagggccaggggatgcagactggtcactctcgggcccctaccc

SEQ ID NO: 3854 - DNA, 17 bp, Homo sapiens
caacgaatgcttggaca

SEQ ID NO: 3855 - DNA, 17 bp, Homo sapiens
tgtccaagcattcgttg

SEQ ID NO: 3856 - DNA, 121 bp, Homo sapiens; identical to SEQ ID NO: 3852

SEQ ID NO: 3857 - DNA, 121 bp, Homo sapiens; identical to SEQ ID NO: 3853

SEQ ID NO: 3858 - DNA, 17 bp, Homo sapiens
caacgaatgcttggaca

SEQ ID NO: 3859 - DNA, 17 bp, Homo sapiens
tgtccaagcattcgttg

SEQ ID NO: 3860 - DNA, 121 bp, Homo sapiens
tgcatcccctggccctgcgcagggaccaacgaatgcttggacaacaacggcggctgttcccacgtctgcaatgaccttaagatcggctacgagtgcctgtgccccgacggcttccagctgg

SEQ ID NO: 3861 - DNA, 121 bp, Homo sapiens
ccagctggaagccgtcggggcacaggcactcgtagccgatcttaaggtcattgcagacgtgggaacagccgccgttgttgtccaagcattcgttggtccctgcgcagggccaggggatgca

SEQ ID NO: 3862 - DNA, 17 bp, Homo sapiens
gctgttcccacgtctgc

SEQ ID NO: 3863 - DNA, 17 bp, Homo sapiens
gcagacgtgggaacagc

SEQ ID NO: 3864 - DNA, 121 bp, Homo sapiens
ccctggccctgcgcagggaccaacgaatgcttggacaacaacggcggctgttcccacgtctgcaatgaccttaagatcggctacgagtgcctgtgccccgacggcttccagctggtggccc

SEQ ID NO: 3865 - DNA, 121 bp, Homo sapiens
gggccaccagctggaagccgtcggggcacaggcactcgtagccgatcttaaggtcattgcagacgtgggaacagccgccgttgttgtccaagcattcgttggtccctgcgcagggccaggg

SEQ ID NO: 3866 - DNA, 17 bp, Homo sapiens
cccacgtctgcaatgac

SEQ ID NO: 3867 - DNA, 17 bp, Homo sapiens
gtcattgcagacgtggg

SEQ ID NO: 3868 - DNA, 121 bp, Homo sapiens
cctggccctgcgcagggaccaacgaatgcttggacaacaacggcggctgttcccacgtctgcaatgaccttaagatcggctacgagtgcctgtgccccgacggcttccagctggtggccca

SEQ ID NO: 3869 - DNA, 121 bp, Homo sapiens
tgggccaccagctggaagccgtcggggcacaggcactcgtagccgatcttaaggtcattgcagacgtgggaacagccgccgttgttgtccaagcattcgttggtccctgcgcagggccagg

SEQ ID NO: 3870 - DNA, 17 bp, Homo sapiens
ccacgtctgcaatgacc

SEQ ID NO: 3871 - DNA, 17 bp, Homo sapiens
ggtcattgcagacgtgg

SEQ ID NO: 3872 - DNA, 121 bp, Homo sapiens
accaacgaatgcttggacaacaacggcggctgttcccacgtctgcaatgaccttaagatcggctacgagtgcctgtgccccgacggcttccagctggtggcccagcgaagatgcgaaggtg

SEQ ID NO: 3873 - DNA, 121 bp, Homo sapiens
caccttcgcatcttcgctgggccaccagctggaagccgtcggggcacaggcactcgtagccgatcttaaggtcattgcagacgtgggaacagccgccgttgttgtccaagcattcgttggt

SEQ ID NO: 3874 - DNA, 17 bp, Homo sapiens
ttaagatcggctacgag

SEQ ID NO: 3875 - DNA, 17 bp, Homo sapiens
ctcgtagccgatcttaa

SEQ ID NO: 3876 - DNA, 121 bp, Homo sapiens
ccaacgaatgcttggacaacaacggcggctgttcccacgtctgcaatgaccttaagatcggctacgagtgcctgtgccccgacggcttccagctggtggcccagcgaagatgcgaaggtga

SEQ ID NO: 3877 - DNA, 121 bp, Homo sapiens
tcaccttcgcatcttcgctgggccaccagctggaagccgtcggggcacaggcactcgtagccgatcttaaggtcattgcagacgtgggaacagccgccgttgttgtccaagcattcgttgg

SEQ ID NO: 3878 - DNA, 17 bp, Homo sapiens
taagatcggctacgagt

SEQ ID NO: 3879 - DNA, 17 bp, Homo sapiens
actcgtagccgatctta

SEQ ID NO: 3880 - DNA, 121 bp, Homo sapiens
cgaatgcttggacaacaacggcggctgttcccacgtctgcaatgaccttaagatcggctacgagtgcctgtgccccgacggcttccagctggtggcccagcgaagatgcgaaggtgatttc

SEQ ID NO: 3881 - DNA, 121 bp, Homo sapiens
gaaatcaccttcgcatcttcgctgggccaccagctggaagccgtcggggcacaggcactcgtagccgatcttaaggtcattgcagacgtgggaacagccgccgttgttgtccaagcattcg

SEQ ID NO: 3882 - DNA, 17 bp, Homo sapiens
atcggctacgagtgcct

SEQ ID NO: 3883 - DNA, 17 bp, Homo sapiens
aggcactcgtagccgat

SEQ ID NO: 3884 - DNA, 121 bp, Homo sapiens
tgcttggacaacaacggcggctgttcccacgtctgcaatgaccttaagatcggctacgagtgcctgtgccccgacggcttccagctggtggcccagcgaagatgcgaaggtgatttccggg

SEQ ID NO: 3885 - DNA, 121 bp, Homo sapiens
cccggaaatcaccttcgcatcttcgctgggccaccagctggaagccgtcggggcacaggcactcgtagccgatcttaaggtcattgcagacgtgggaacagccgccgttgttgtccaagca

SEQ ID NO: 3886 - DNA, 17 bp, Homo sapiens
gctacgagtgcctgtgc

SEQ ID NO: 3887 - DNA, 17 bp, Homo sapiens
gcacaggcactcgtagc

SEQ ID NO: 3888 - DNA, 121 bp, Homo sapiens; identical to SEQ ID NO: 3884

SEQ ID NO: 3889 - DNA, 121 bp, Homo sapiens; identical to SEQ ID NO: 3885

SEQ ID NO: 3890 - DNA, 17 bp, Homo sapiens
gctacgagtgcctgtgc

SEQ ID NO: 3891 - DNA, 17 bp, Homo sapiens
gcacaggcactcgtagc

SEQ ID NO: 3892 - DNA, 121 bp, Homo sapiens
acaacggcggctgttcccacgtctgcaatgaccttaagatcggctacgagtgcctgtgccccgacggcttccagctggtggcccagcgaagatgcgaaggtgatttccgggtgggactgag

SEQ ID NO: 3893 - DNA, 121 bp, Homo sapiens
ctcagtcccacccggaaatcaccttcgcatcttcgctgggccaccagctggaagccgtcggggcacaggcactcgtagccgatcttaaggtcattgcagacgtgggaacagccgccgttgt

SEQ ID NO: 3894 - DNA, 17 bp, Homo sapiens
cctgtgccccgacggct

SEQ ID NO: 3895 - DNA, 17 bp, Homo sapiens
agccgtcggggcacagg

SEQ ID NO: 3896 - DNA, 121 bp, Homo sapiens
aacggcggctgttcccacgtctgcaatgaccttaagatcggctacgagtgcctgtgccccgacggcttccagctggtggcccagcgaagatgcgaaggtgatttccgggtgggactgagcc

SEQ ID NO: 3897 - DNA, 121 bp, Homo sapiens
ggctcagtcccacccggaaatcaccttcgcatcttcgctgggccaccagctggaagccgtcggggcacaggcactcgtagccgatcttaaggtcattgcagacgtgggaacagccgccgtt

SEQ ID NO: 3898 - DNA, 17 bp, Homo sapiens
tgtgccccgacggcttc

SEQ ID NO: 3899 - DNA, 17 bp, Homo sapiens
gaagccgtcggggcaca

SEQ ID NO: 3900 - DNA, 121 bp, Homo sapiens
cggcggctgttcccacgtctgcaatgaccttaagatcggctacgagtgcctgtgccccgacggcttccagctggtggcccagcgaagatgcgaaggtgatttccgggtgggactgagccct

SEQ ID NO: 3901 - DNA, 121 bp, Homo sapiens
agggctcagtcccacccggaaatcaccttcgcatcttcgctgggccaccagctggaagccgtcggggcacaggcactcgtagccgatcttaaggtcattgcagacgtgggaacagccgccg

SEQ ID NO: 3902 - DNA, 17 bp, Homo sapiens
tgccccgacggcttcca

SEQ ID NO: 3903 - DNA, 17 bp, Homo sapiens
tggaagccgtcggggca

SEQ ID NO: 3904 - DNA, 121 bp, Homo sapiens
ggcggctgttcccacgtctgcaatgaccttaagatcggctacgagtgcctgtgccccgacggcttccagctggtggcccagcgaagatgcgaaggtgatttccgggtgggactgagccctg

SEQ ID NO: 3905 - DNA, 121 bp, Homo sapiens
cagggctcagtcccacccggaaatcaccttcgcatcttcgctgggccaccagctggaagccgtcggggcacaggcactcgtagccgatcttaaggtcattgcagacgtgggaacagccgcc

SEQ ID NO: 3906 - DNA, 17 bp, Homo sapiens
gccccgacggcttccag

SEQ ID NO: 3907 - DNA, 17 bp, Homo sapiens
ctggaagccgtcggggc

SEQ ID NO: 3908 - DNA, 121 bp, Homo sapiens
tgttcccacgtctgcaatgaccttaagatcggctacgagtgcctgtgccccgacggcttccagctggtggcccagcgaagatgcgaaggtgatttccgggtgggactgagccctgggcccc

SEQ ID NO: 3909 - DNA, 121 bp, Homo sapiens
ggggcccagggctcagtcccacccggaaatcaccttcgcatcttcgctgggccaccagctggaagccgtcggggcacaggcactcgtagccgatcttaaggtcattgcagacgtgggaaca

SEQ ID NO: 3910 - DNA, 17 bp, Homo sapiens
acggcttccagctggtg

SEQ ID NO: 3911 - DNA, 17 bp, Homo sapiens
caccagctggaagccgt

SEQ ID NO: 3912 - DNA, 121 bp, Homo sapiens
atgaccttaagatcggctacgagtgcctgtgccccgacggcttccagctggtggcccagcgaagatgcgaaggtgatttccgggtgggactgagccctgggccccctctgcgcttcctgac

SEQ ID NO: 3913 - DNA, 121 bp, Homo sapiens
gtcaggaagcgcagagggggcccagggctcagtcccacccggaaatcaccttcgcatcttcgctgggccaccagctggaagccgtcggggcacaggcactcgtagccgatcttaaggtcat

SEQ ID NO: 3914 - DNA, 17 bp, Homo sapiens
ggcccagcgaagatgcg

SEQ ID NO: 3915 - DNA, 17 bp, Homo sapiens
cgcatcttcgctgggcc

SEQ ID NO: 3916 - DNA, 121 bp, Homo sapiens
aatgaccttaagatcggctacgagtgcctgtgccccgacggcttccagctggtggcccagcgaagatgcgaaggtgatttccgggtgggactgagccctgggccccctctgcgcttcctga

SEQ ID NO: 3917 - DNA, 121 bp, Homo sapiens
tcaggaagcgcagagggggcccagggctcagtcccacccggaaatcaccttcgcatcttcgctgggccaccagctggaagccgtcggggcacaggcactcgtagccgatcttaaggtcatt

SEQ ID NO: 3918 - DNA, 17 bp, Homo sapiens
tggcccagcgaagatgc

SEQ ID NO: 3919 - DNA, 17 bp, Homo sapiens
gcatcttcgctgggcca

SEQ ID NO: 3920 - DNA, 121 bp, Homo sapiens
tctagccattggggaagagcctccccaccaagcctctttctctctcttccagatatcgatgagtgtcaggatcccgacacctgcagccagctctgcgtgaacctggagggtggctacaagt

SEQ ID NO: 3921 - DNA, 121 bp, Homo sapiens
acttgtagccaccctccaggttcacgcagagctggctgcaggtgtcgggatcctgacactcatcgatatctggaagagagagaaagaggcttggtggggaggctcttccccaatggctaga

SEQ ID NO: 3922 - DNA, 17 bp, Homo sapiens
atatcgatgagtgtcag

SEQ ID NO: 3923 - DNA, 17 bp, Homo sapiens
ctgacactcatcgatat

SEQ ID NO: 3924 - DNA, 121 bp, Homo sapiens
cattggggaagagcctccccaccaagcctctttctctctcttccagatatcgatgagtgtcaggatcccgacacctgcagccagctctgcgtgaacctggagggtggctacaagtgccagt

SEQ ID NO: 3925 - DNA, 121 bp, Homo sapiens
actggcacttgtagccaccctccaggttcacgcagagctggctgcaggtgtcgggatcctgacactcatcgatatctggaagagagagaaagaggcttggtggggaggctcttccccaatg

SEQ ID NO: 3926 - DNA, 17 bp, Homo sapiens
atgagtgtcaggatccc

SEQ ID NO: 3927 - DNA, 17 bp, Homo sapiens
gggatcctgacactcat

SEQ ID NO: 3928 - DNA, 121 bp, Homo sapiens
tccccaccaagcctctttctctctcttccagatatcgatgagtgtcaggatcccgacacctgcagccagctctgcgtgaacctggagggtggctacaagtgccagtgtgaggaaggcttcc

SEQ ID NO: 3929 - DNA, 121 bp, Homo sapiens
ggaagccttcctcacactggcacttgtagccaccctccaggttcacgcagagctggctgcaggtgtcgggatcctgacactcatcgatatctggaagagagagaaagaggcttggtgggga

SEQ ID NO: 3930 - DNA, 17 bp, Homo sapiens
ccgacacctgcagccag

SEQ ID NO: 3931 - DNA, 17 bp, Homo sapiens
ctggctgcaggtgtcgg

SEQ ID NO: 3932 - DNA, 121 bp, Homo sapiens
caagcctctttctctctcttccagatatcgatgagtgtcaggatcccgacacctgcagccagctctgcgtgaacctggagggtggctacaagtgccagtgtgaggaaggcttccagctgga

SEQ ID NO: 3933 - DNA, 121 bp, Homo sapiens
tccagctggaagccttcctcacactggcacttgtagccaccctccaggttcacgcagagctggctgcaggtgtcgggatcctgacactcatcgatatctggaagagagagaaagaggcttg

SEQ ID NO: 3934 - DNA, 17 bp, Homo sapiens
ctgcagccagctctgcg

SEQ ID NO: 3935 - DNA, 17 bp, Homo sapiens
cgcagagctggctgcag

SEQ ID NO: 3936 - DNA, 121 bp, Homo sapiens
tctttctctctcttccagatatcgatgagtgtcaggatcccgacacctgcagccagctctgcgtgaacctggagggtggctacaagtgccagtgtgaggaaggcttccagctggaccccca

SEQ ID NO: 3937 - DNA, 121 bp, Homo sapiens
tgggggtccagctggaagccttcctcacactggcacttgtagccaccctccaggttcacgcagagctggctgcaggtgtcgggatcctgacactcatcgatatctggaagagagagaaaga

SEQ ID NO: 3938 - DNA, 17 bp, Homo sapiens
ccagctctgcgtgaacc

SEQ ID NO: 3939 - DNA, 17 bp, Homo sapiens
ggttcacgcagagctgg

SEQ ID NO: 3940 - DNA, 121 bp, Homo sapiens
ctctttctctctcttccagatatcgatgagtgtcaggatcccgacacctgcagccagctctgcgtgaacctggagggtggctacaagtgccagtgtgaggaaggcttccagctggaccccc

SEQ ID NO: 3941 - DNA, 121 bp, Homo sapiens
gggggtccagctggaagccttcctcacactggcacttgtagccaccctccaggttcacgcagagctggctgcaggtgtcgggatcctgacactcatcgatatctggaagagagagaaagag

SEQ ID NO: 3942 - DNA, 17 bp, Homo sapiens
gccagctctgcgtgaac

SEQ ID NO: 3943 - DNA, 17 bp, Homo sapiens
gttcacgcagagctggc

SEQ ID NO: 3944 - DNA, 121 bp, Homo sapiens
cagatatcgatgagtgtcaggatcccgacacctgcagccagctctgcgtgaacctggagggtggctacaagtgccagtgtgaggaaggcttccagctggacccccacacgaaggcctgcaa

SEQ ID NO: 3945 - DNA, 121 bp, Homo sapiens
ttgcaggccttcgtgtgggggtccagctggaagccttcctcacactggcacttgtagccaccctccaggttcacgcagagctggctgcaggtgtcgggatcctgacactcatcgatatctg

SEQ ID NO: 3946 - DNA, 17 bp, Homo sapiens
cctggagggtggctaca

SEQ ID NO: 3947 - DNA, 17 bp, Homo sapiens
tgtagccaccctccagg

SEQ ID NO: 3948 - DNA, 121 bp, Homo sapiens
tcgatgagtgtcaggatcccgacacctgcagccagctctgcgtgaacctggagggtggctacaagtgccagtgtgaggaaggcttccagctggacccccacacgaaggcctgcaaggctgt

SEQ ID NO: 3949 - DNA, 121 bp, Homo sapiens
acagccttgcaggccttcgtgtgggggtccagctggaagccttcctcacactggcacttgtagccaccctccaggttcacgcagagctggctgcaggtgtcgggatcctgacactcatcga

SEQ ID NO: 3950 - DNA, 17 bp, Homo sapiens
gggtggctacaagtgcc

SEQ ID NO: 3951 - DNA, 17 bp, Homo sapiens
ggcacttgtagccaccc

SEQ ID NO: 3952 - DNA, 121 bp, Homo sapiens
caggatcccgacacctgcagccagctctgcgtgaacctggagggtggctacaagtgccagtgtgaggaaggcttccagctggacccccacacgaaggcctgcaaggctgtgggtgagcacg

SEQ ID NO: 3953 - DNA, 121 bp, Homo sapiens
cgtgctcacccacagccttgcaggccttcgtgtgggggtccagctggaagccttcctcacactggcacttgtagccaccctccaggttcacgcagagctggctgcaggtgtcgggatcctg

SEQ ID NO: 3954 - DNA, 17 bp, Homo sapiens
agtgccagtgtgaggaa

SEQ ID NO: 3955 - DNA, 17 bp, Homo sapiens
ttcctcacactggcact

SEQ ID NO: 3956 - DNA, 121 bp, Homo sapiens
tgcagccagctctgcgtgaacctggagggtggctacaagtgccagtgtgaggaaggcttccagctggacccccacacgaaggcctgcaaggctgtgggtgagcacgggaaggcggcgggtg

SEQ ID NO: 3957 - DNA, 121 bp, Homo sapiens
cacccgccgccttcccgtgctcacccacagccttgcaggccttcgtgtgggggtccagctggaagccttcctcacactggcacttgtagccaccctccaggttcacgcagagctggctgca

SEQ ID NO: 3958 - DNA, 17 bp, Homo sapiens
aaggcttccagctggac

SEQ ID NO: 3959 - DNA, 17 bp, Homo sapiens
gtccagctggaagcctt

SEQ ID NO: 3960 - DNA, 121 bp, Homo sapiens
gcaggagcaaaggcgccatggctgtggagtcccagggcggacgcccacttgtcctgggcctgctgctgtgtgtgctgggcccagtggtgtcccatgctgggaagatactgttgatcccagt

SEQ ID NO: 3961 - DNA, 121 bp, Homo sapiens
actgggatcaacagtatcttcccagcatgggacaccactgggcccagcacacacagcagcaggcccaggacaagtgggcgtccgccctgggactccacagccatggcgcctttgctcctgc

SEQ ID NO: 3962 - DNA, 17 bp, Homo sapiens
cctgggcctgctgctgt

SEQ ID NO: 3963 - DNA, 17 bp, Homo sapiens
acagcagcaggcccagg

SEQ ID NO: 3964 - DNA, 121 bp, Homo sapiens
gggaagatactgttgatcccagtggatggcagccactggctgagcatgcttggggccatccagcagctgcagcagaggggacatgaaatagttgtcctagcacctgacgcctcgttgtaca

SEQ ID NO: 3965 - DNA, 121 bp, Homo sapiens
tgtacaacgaggcgtcaggtgctaggacaactatttcatgtcccctctgctgcagctgctggatggccccaagcatgctcagccagtggctgccatccactgggatcaacagtatcttccc

SEQ ID NO: 3966 - DNA, 17 bp, Homo sapiens
gggccatccagcagctg

SEQ ID NO: 3967 - DNA, 17 bp, Homo sapiens
cagctgctggatggccc

SEQ ID NO: 3968 - DNA, 121 bp, Homo sapiens
cagcagaggggacatgaaatagttgtcctagcacctgacgcctcgttgtacatcagagacggagcattttacaccttgaagacgtaccctgtgccattccaaagggaggatgtgaaagagt

SEQ ID NO: 3969 - DNA, 121 bp, Homo sapiens
actctttcacatcctccctttggaatggcacagggtacgtcttcaaggtgtaaaatgctccgtctctgatgtacaacgaggcgtcaggtgctaggacaactatttcatgtcccctctgctg

SEQ ID NO: 3970 - DNA, 17 bp, Homo sapiens
tcagagacggagcattt

SEQ ID NO: 3971 - DNA, 17 bp, Homo sapiens
aaatgctccgtctctga

SEQ ID NO: 3972 - DNA, 121 bp, Homo sapiens
gggtgaagaacatgctcattgccttttcacagaactttctgtgcgacgtggtttattccccgtatgcaacccttgcctcagaattccttcagagagaggtgactgtccaggacctattgag

SEQ ID NO: 3973 - DNA, 121 bp, Homo sapiens
ctcaataggtcctggacagtcacctctctctgaaggaattctgaggcaagggttgcatacggggaataaaccacgtcgcacagaaagttctgtgaaaaggcaatgagcatgttcttcaccc

SEQ ID NO: 3974 - DNA, 17 bp, Homo sapiens
ttattccccgtatgcaa

SEQ ID NO: 3975 - DNA, 17 bp, Homo sapiens
ttgcatacggggaataa

SEQ ID NO: 3976 - DNA, 121 bp, Homo sapiens
tgtgaaggattaccctaggcccatcatgcccaatatggtttttgttggtggaatcaactgccttcaccaaaatccactatcccaggtgtgtattggagtgggacttttacatgcgtatatt

SEQ ID NO: 3977 - DNA, 121 bp, Homo sapiens
aatatacgcatgtaaaagtcccactccaatacacacctgggatagtggattttggtgaaggcagttgattccaccaacaaaaaccatattgggcatgatgggcctagggtaatccttcaca

SEQ ID NO: 3978 - DNA, 17 bp, Homo sapiens
atcaactgccttcacca

SEQ ID NO: 3979 - DNA, 17 bp, Homo sapiens
tggtgaaggcagttgat

SEQ ID NO: 3980 - DNA, 121 bp, Homo sapiens
atcaaagaatatgagaaaaaattaactgaaaatttttcttctggctctaggaatttgaagcctacattaatgcttctggagaacatggaattgtggttttctctttgggatcaatggtctc

SEQ ID NO: 3981 - DNA, 121 bp, Homo sapiens
gagaccattgatcccaaagagaaaaccacaattccatgttctccagaagcattaatgtaggcttcaaattcctagagccagaagaaaaattttcagttaattttttctcatattctttgat

SEQ ID NO: 3982 - DNA, 17 bp, Homo sapiens
atttgaagcctacatta

SEQ ID NO: 3983 - DNA, 17 bp, Homo sapiens
taatgtaggcttcaaat

SEQ ID NO: 3984 - DNA, 121 bp, Homo sapiens
aggaatttgaagcctacattaatgcttctggagaacatggaattgtggttttctctttgggatcaatggtctcagaaattccagagaagaaagctatggcaattgctgatgctttgggcaa

SEQ ID NO: 3985 - DNA, 121 bp, Homo sapiens
ttgcccaaagcatcagcaattgccatagctttcttctctggaatttctgagaccattgatcccaaagagaaaaccacaattccatgttctccagaagcattaatgtaggcttcaaattcct

SEQ ID NO: 3986 - DNA, 17 bp, Homo sapiens
ctctttgggatcaatgg

SEQ ID NO: 3987 - DNA, 17 bp, Homo sapiens
ccattgatcccaaagag

SEQ ID NO: 3988 - DNA, 121 bp, Homo sapiens
gtctcagaaattccagagaagaaagctatggcaattgctgatgctttgggcaaaatccctcagacagtaagaagattctataccatggcctcatatctattttcacaggagcgctaatccc

SEQ ID NO: 3989 - DNA, 121 bp, Homo sapiens
gggattagcgctcctgtgaaaatagatatgaggccatggtatagaatcttcttactgtctgagggattttgcccaaagcatcagcaattgccatagctttcttctctggaatttctgagac

SEQ ID NO: 3990 - DNA, 17 bp, Homo sapiens
aaatccctcagacagta

SEQ ID NO: 3991 - DNA, 17 bp, Homo sapiens
tactgtctgagggattt

SEQ ID NO: 3992 - DNA, 121 bp, Homo sapiens
tctaatcatattatgttctttctttacgttctgctctttttgcccctcccaggtcctgtggcggtacactggaacccgaccatcgaatcttgcgaacaacacgatacttgttaagtggcta

SEQ ID NO: 3993 - DNA, 121 bp, Homo sapiens
tagccacttaacaagtatcgtgttgttcgcaagattcgatggtcgggttccagtgtaccgccacaggacctgggaggggcaaaaagagcagaacgtaaagaaagaacataatatgattaga

SEQ ID NO: 3994 - DNA, 17 bp, Homo sapiens
gtcctgtggcggtacac

SEQ ID NO: 3995 - DNA, 17 bp, Homo sapiens
gtgtaccgccacaggac

SEQ ID NO: 3996 - DNA, 121 bp, Homo sapiens
acactggaacccgaccatcgaatcttgcgaacaacacgatacttgttaagtggctaccccaaaacgatctgcttggtatgttgggcggattggatgtataggtcaaaccagggtcaaatta

SEQ ID NO: 3997 - DNA, 121 bp, Homo sapiens
taatttgaccctggtttgacctatacatccaatccgcccaacataccaagcagatcgttttggggtagccacttaacaagtatcgtgttgttcgcaagattcgatggtcgggttccagtgt

SEQ ID NO: 3998 - DNA, 17 bp, Homo sapiens
gctaccccaaaacgatc

SEQ ID NO: 3999 - DNA, 17 bp, Homo sapiens
gatcgttttggggtagc

SEQ ID NO: 4000 - DNA, 121 bp, Homo sapiens
tacactggaacccgaccatcgaatcttgcgaacaacacgatacttgttaagtggctaccccaaaacgatctgcttggtatgttgggcggattggatgtataggtcaaaccagggtcaaatt

SEQ ID NO: 4001 - DNA, 121 bp, Homo sapiens
aatttgaccctggtttgacctatacatccaatccgcccaacataccaagcagatcgttttggggtagccacttaacaagtatcgtgttgttcgcaagattcgatggtcgggttccagtgta

SEQ ID NO: 4002 - DNA, 17 bp, Homo sapiens
ggctaccccaaaacgat

SEQ ID NO: 4003 - DNA, 17 bp, Homo sapiens
atcgttttggggtagcc

SEQ ID NO: 4004 - DNA, 121 bp, Homo sapiens
aactcagagatgtaactgctgacatcctccctattttgcatctcaggtcacccgatgacccgtgcctttatcacccatgctggttcccatggtgtttatgaaagcatatgcaatggcgttc

SEQ ID NO: 4005 - DNA, 121 bp, Homo sapiens
gaacgccattgcatatgctttcataaacaccatgggaaccagcatgggtgataaaggcacgggtcatcgggtgacctgagatgcaaaatagggaggatgtcagcagttacatctctgagtt

SEQ ID NO: 4006 - DNA, 17 bp, Homo sapiens
cgatgacccgtgccttt

SEQ ID NO: 4007 - DNA, 17 bp, Homo sapiens
aaaggcacgggtcatcg

SEQ ID NO: 4008 - DNA, 121 bp, Homo sapiens
tcagagatgtaactgctgacatcctccctattttgcatctcaggtcacccgatgacccgtgcctttatcacccatgctggttcccatggtgtttatgaaagcatatgcaatggcgttccca

SEQ ID NO: 4009 - DNA, 121 bp, Homo sapiens
tgggaacgccattgcatatgctttcataaacaccatgggaaccagcatgggtgataaaggcacgggtcatcgggtgacctgagatgcaaaatagggaggatgtcagcagttacatctctga

SEQ ID NO: 4010 - DNA, 17 bp, Homo sapiens
tgacccgtgcctttatc

SEQ ID NO: 4011 - DNA, 17 bp, Homo sapiens
gataaaggcacgggtca

SEQ ID NO: 4012 - DNA, 121 bp, Homo sapiens
cctccctattttgcatctcaggtcacccgatgacccgtgcctttatcacccatgctggttcccatggtgtttatgaaagcatatgcaatggcgttcccatggtgatgatgcccttgtttgg

SEQ ID NO: 4013 - DNA, 121 bp, Homo sapiens
ccaaacaagggcatcatcaccatgggaacgccattgcatatgctttcataaacaccatgggaaccagcatgggtgataaaggcacgggtcatcgggtgacctgagatgcaaaatagggagg

SEQ ID NO: 4014 - DNA, 17 bp, Homo sapiens
tgctggttcccatggtg

SEQ ID NO: 4015 - DNA, 17 bp, Homo sapiens
caccatgggaaccagca

SEQ ID NO: 4016 - DNA, 121 bp, Homo sapiens
aggtcacccgatgacccgtgcctttatcacccatgctggttcccatggtgtttatgaaagcatatgcaatggcgttcccatggtgatgatgcccttgtttggtgatcagatggacaatgca

SEQ ID NO: 4017 - DNA, 121 bp, Homo sapiens
tgcattgtccatctgatcaccaaacaagggcatcatcaccatgggaacgccattgcatatgctttcataaacaccatgggaaccagcatgggtgataaaggcacgggtcatcgggtgacct

SEQ ID NO: 4018 - DNA, 17 bp, Homo sapiens
tatgaaagcatatgcaa

SEQ ID NO: 4019 - DNA, 17 bp, Homo sapiens
ttgcatatgctttcata

SEQ ID NO: 4020 - DNA, 121 bp, Homo sapiens
agcatatgcaatggcgttcccatggtgatgatgcccttgtttggtgatcagatggacaatgcaaagcgcatggagactaagggagctggagtgaccctgaatgttctggaaatgacttctg

SEQ ID NO: 4021 - DNA, 121 bp, Homo sapiens
cagaagtcatttccagaacattcagggtcactccagctcccttagtctccatgcgctttgcattgtccatctgatcaccaaacaagggcatcatcaccatgggaacgccattgcatatgct

SEQ ID NO: 4022 - DNA, 17 bp, Homo sapiens
tggacaatgcaaagcgc

SEQ ID NO: 4023 - DNA, 17 bp, Homo sapiens
gcgctttgcattgtcca

SEQ ID NO: 4024 - DNA, 121 bp, Homo sapiens
ggagctggagtgaccctgaatgttctggaaatgacttctgaagatttagaaaatgctctaaaagcagtcatcaatgacaaaaggtaagaaagaagatacagaagaatactttggtcatggc

SEQ ID NO: 4025 - DNA, 121 bp, Homo sapiens
gccatgaccaaagtattcttctgtatcttctttcttaccttttgtcattgatgactgcttttagagcattttctaaatcttcagaagtcatttccagaacattcagggtcactccagctcc

SEQ ID NO: 4026 - DNA, 17 bp, Homo sapiens
atgctctaaaagcagtc

SEQ ID NO: 4027 - DNA, 17 bp, Homo sapiens
gactgcttttagagcat

SEQ ID NO: 4028 - DNA, 121 bp, Homo sapiens
atgaggcacaagggcgcgccacacctgcgccccgcagcccacgacctcacctggtaccagtaccattccttggacgtgattggtttcctcttggccgtcgtgctgacagtggccttcatca

SEQ ID NO: 4029 - DNA, 121 bp, Homo sapiens
tgatgaaggccactgtcagcacgacggccaagaggaaaccaatcacgtccaaggaatggtactggtaccaggtgaggtcgtgggctgcggggcgcaggtgtggcgcgcccttgtgcctcat

SEQ ID NO: 4030 - DNA, 17 bp, Homo sapiens
ggtaccagtaccattcc

SEQ ID NO: 4031 - DNA, 17 bp, Homo sapiens
ggaatggtactggtacc

SEQ ID NO: 4032 - DNA, 121 bp, Homo sapiens
acaagggcgcgccacacctgcgccccgcagcccacgacctcacctggtaccagtaccattccttggacgtgattggtttcctcttggccgtcgtgctgacagtggccttcatcacctttaa

SEQ ID NO: 4033 - DNA, 121 bp, Homo sapiens
ttaaaggtgatgaaggccactgtcagcacgacggccaagaggaaaccaatcacgtccaaggaatggtactggtaccaggtgaggtcgtgggctgcggggcgcaggtgtggcgcgcccttgt

SEQ ID NO: 4034 - DNA, 17 bp, Homo sapiens
gtaccattccttggacg

SEQ ID NO: 4035 - DNA, 17 bp, Homo sapiens
cgtccaaggaatggtac

SEQ ID NO: 4036 - DNA, 121 bp, Homo sapiens
ctgcatactttaattatgatgtaatacaggttctgggttgacaaatatcaagacggaggagatctctgaagtgaagatggatgcagaattccgacatgactcaggatatgaagttcatcat

SEQ ID NO: 4037 - DNA, 121 bp, Homo sapiens
atgatgaacttcatatcctgagtcatgtcggaattctgcatccatcttcacttcagagatctcctccgtcttgatatttgtcaacccagaacctgtattacatcataattaaagtatgcag

SEQ ID NO: 4038 - DNA, 17 bp, Homo sapiens
acggaggagatctctga

SEQ ID NO: 4039 - DNA, 17 bp, Homo sapiens
tcagagatctcctccgt

SEQ ID NO: 4040 - DNA, 121 bp, Homo sapiens
attatattgcatttagaaattaaaattctttttcttaatttgttttcaaggtgttctttgcagaagatgtgggttcaaacaaaggtgcaatcattggactcatggtgggcggtgttgtcat

SEQ ID NO: 4041 - DNA, 121 bp, Homo sapiens
atgacaacaccgcccaccatgagtccaatgattgcacctttgtttgaacccacatcttctgcaaagaacaccttgaaaacaaattaagaaaaagaattttaatttctaaatgcaatataat

SEQ ID NO: 4042 - DNA, 17 bp, Homo sapiens
gttctttgcagaagatg

SEQ ID NO: 4043 - DNA, 17 bp, Homo sapiens
catcttctgcaaagaac

SEQ ID NO: 4044 - DNA, 121 bp, Homo sapiens
tatattgcatttagaaattaaaattctttttcttaatttgttttcaaggtgttctttgcagaagatgtgggttcaaacaaaggtgcaatcattggactcatggtgggcggtgttgtcatag

SEQ ID NO: 4045 - DNA, 121 bp, Homo sapiens
ctatgacaacaccgcccaccatgagtccaatgattgcacctttgtttgaacccacatcttctgcaaagaacaccttgaaaacaaattaagaaaaagaattttaatttctaaatgcaatata

SEQ ID NO: 4046 - DNA, 17 bp, Homo sapiens
tctttgcagaagatgtg

SEQ ID NO: 4047 - DNA, 17 bp, Homo sapiens
cacatcttctgcaaaga

SEQ ID NO: 4048 - DNA, 121 bp, Homo sapiens
atattgcatttagaaattaaaattctttttcttaatttgttttcaaggtgttctttgcagaagatgtgggttcaaacaaaggtgcaatcattggactcatggtgggcggtgttgtcatagc

SEQ ID NO: 4049 - DNA, 121 bp, Homo sapiens
gctatgacaacaccgcccaccatgagtccaatgattgcacctttgtttgaacccacatcttctgcaaagaacaccttgaaaacaaattaagaaaaagaattttaatttctaaatgcaatat

SEQ ID NO: 4050 - DNA, 17 bp, Homo sapiens
ctttgcagaagatgtgg

SEQ ID NO: 4051 - DNA, 17 bp, Homo sapiens
ccacatcttctgcaaag

SEQ ID NO: 4052 - DNA, 121 bp, Homo sapiens
gaagatgtgggttcaaacaaaggtgcaatcattggactcatggtgggcggtgttgtcatagcgacagtgatcgtcatcaccttggtgatgctgaagaagaaacagtacacatccattcatc

SEQ ID NO: 4053 - DNA, 121 bp, Homo sapiens
gatgaatggatgtgtactgtttcttcttcagcatcaccaaggtgatgacgatcactgtcgctatgacaacaccgcccaccatgagtccaatgattgcacctttgtttgaacccacatcttc

SEQ ID NO: 4054 - DNA, 17 bp, Homo sapiens
ttgtcatagcgacagtg

SEQ ID NO: 4055 - DNA, 17 bp, Homo sapiens
cactgtcgctatgacaa

SEQ ID NO: 4056 - DNA, 121 bp, Homo sapiens
aagatgtgggttcaaacaaaggtgcaatcattggactcatggtgggcggtgttgtcatagcgacagtgatcgtcatcaccttggtgatgctgaagaagaaacagtacacatccattcatca

SEQ ID NO: 4057 - DNA, 121 bp, Homo sapiens
tgatgaatggatgtgtactgtttcttcttcagcatcaccaaggtgatgacgatcactgtcgctatgacaacaccgcccaccatgagtccaatgattgcacctttgtttgaacccacatctt

SEQ ID NO: 4058 - DNA, 17 bp, Homo sapiens
tgtcatagcgacagtga

SEQ ID NO: 4059 - DNA, 17 bp, Homo sapiens
tcactgtcgctatgaca

SEQ ID NO: 4060 - DNA, 121 bp, Homo sapiens
gtgggttcaaacaaaggtgcaatcattggactcatggtgggcggtgttgtcatagcgacagtgatcgtcatcaccttggtgatgctgaagaagaaacagtacacatccattcatcatggtg

SEQ ID NO: 4061 - DNA, 121 bp, Homo sapiens
caccatgatgaatggatgtgtactgtttcttcttcagcatcaccaaggtgatgacgatcactgtcgctatgacaacaccgcccaccatgagtccaatgattgcacctttgtttgaacccac

SEQ ID NO: 4062 - DNA, 17 bp, Homo sapiens
tagcgacagtgatcgtc

SEQ ID NO: 4063 - DNA, 17 bp, Homo sapiens
gacgatcactgtcgcta

SEQ ID NO: 4064 - DNA, 121 bp, Homo sapiens
ggttcaaacaaaggtgcaatcattggactcatggtgggcggtgttgtcatagcgacagtgatcgtcatcaccttggtgatgctgaagaagaaacagtacacatccattcatcatggtgtgg

SEQ ID NO: 4065 - DNA, 121 bp, Homo sapiens
ccacaccatgatgaatggatgtgtactgtttcttcttcagcatcaccaaggtgatgacgatcactgtcgctatgacaacaccgcccaccatgagtccaatgattgcacctttgtttgaacc

SEQ ID NO: 4066 - DNA, 17 bp, Homo sapiens
cgacagtgatcgtcatc

SEQ ID NO: 4067 - DNA, 17 bp, Homo sapiens
gatgacgatcactgtcg

SEQ ID NO: 4068 - DNA, 121 bp, Homo sapiens
caaacaaaggtgcaatcattggactcatggtgggcggtgttgtcatagcgacagtgatcgtcatcaccttggtgatgctgaagaagaaacagtacacatccattcatcatggtgtggtgga

SEQ ID NO: 4069 - DNA, 121 bp, Homo sapiens
tccaccacaccatgatgaatggatgtgtactgtttcttcttcagcatcaccaaggtgatgacgatcactgtcgctatgacaacaccgcccaccatgagtccaatgattgcacctttgtttg

SEQ ID NO: 4070 - DNA, 17 bp, Homo sapiens
agtgatcgtcatcacct

SEQ ID NO: 4071 - DNA, 17 bp, Homo sapiens
aggtgatgacgatcact

SEQ ID NO: 4072 - DNA, 121 bp, Homo sapiens
tcaaacaaaggtgcaatcattggactcatggtgggcggtgttgtcatagcgacagtgatcgtcatcaccttggtgatgctgaagaagaaacagtacacatccattcatcatggtgtggtgg

SEQ ID NO: 4073 - DNA, 121 bp, Homo sapiens
ccaccacaccatgatgaatggatgtgtactgtttcttcttcagcatcaccaaggtgatgacgatcactgtcgctatgacaacaccgcccaccatgagtccaatgattgcacctttgtttga

SEQ ID NO: 4074 - DNA, 17 bp, Homo sapiens
cagtgatcgtcatcacc

SEQ ID NO: 4075 - DNA, 17 bp, Homo sapiens
ggtgatgacgatcactg

SEQ ID NO: 4076 - DNA, 121 bp, Homo sapiens; identical to SEQ ID NO: 4072

SEQ ID NO: 4077 - DNA, 121 bp, Homo sapiens; identical to SEQ ID NO: 4073

SEQ ID NO: 4078 - DNA, 17 bp, Homo sapiens
cagtgatcgtcatcacc

SEQ ID NO: 4079 - DNA, 17 bp, Homo sapiens
ggtgatgacgatcactg

SEQ ID NO: 4080 - DNA, 121 bp, Homo sapiens
ttggactcatggtgggcggtgttgtcatagcgacagtgatcgtcatcaccttggtgatgctgaagaagaaacagtacacatccattcatcatggtgtggtggaggtaggtaaacttgactg

SEQ ID NO: 4081 - DNA, 121 bp, Homo sapiens
cagtcaagtttacctacctccaccacaccatgatgaatggatgtgtactgtttcttcttcagcatcaccaaggtgatgacgatcactgtcgctatgacaacaccgcccaccatgagtccaa

SEQ ID NO: 4082 - DNA, 17 bp, Homo sapiens
ggtgatgctgaagaaga

SEQ ID NO: 4083 - DNA, 17 bp, Homo sapiens
tcttcttcagcatcacc

SEQ ID NO: 4084 - DNA, 121 bp, Homo sapiens
cccggcaggtggtggagcaagatgaggaagaagatgaggagctgacattgaaatatggcgccaagcatgtgatcatgctctttgtccctgtgactctctgcatggtggtggtcgtggctac

SEQ ID NO: 4085 - DNA, 121 bp, Homo sapiens
gtagccacgaccaccaccatgcagagagtcacagggacaaagagcatgatcacatgcttggcgccatatttcaatgtcagctcctcatcttcttcctcatcttgctccaccacctgccggg

SEQ ID NO: 4086 - DNA, 17 bp, Homo sapiens
atatggcgccaagcatg

SEQ ID NO: 4087 - DNA, 17 bp, Homo sapiens
catgcttggcgccatat

SEQ ID NO: 4088 - DNA, 121 bp, Homo sapiens
gtggtggagcaagatgaggaagaagatgaggagctgacattgaaatatggcgccaagcatgtgatcatgctctttgtccctgtgactctctgcatggtggtggtcgtggctaccattaagt

SEQ ID NO: 4089 - DNA, 121 bp, Homo sapiens
acttaatggtagccacgaccaccaccatgcagagagtcacagggacaaagagcatgatcacatgcttggcgccatatttcaatgtcagctcctcatcttcttcctcatcttgctccaccac

SEQ ID NO: 4090 - DNA, 17 bp, Homo sapiens
ccaagcatgtgatcatg

SEQ ID NO: 4091 - DNA, 17 bp, Homo sapiens
catgatcacatgcttgg

SEQ ID NO: 4092 - DNA, 121 bp, Homo sapiens
aaatatggcgccaagcatgtgatcatgctctttgtccctgtgactctctgcatggtggtggtcgtggctaccattaagtcagtcagcttttatacccggaaggatgggcagctgtacgtat

SEQ ID NO: 4093 - DNA, 121 bp, Homo sapiens
atacgtacagctgcccatccttccgggtataaaagctgactgacttaatggtagccacgaccaccaccatgcagagagtcacagggacaaagagcatgatcacatgcttggcgccatattt

SEQ ID NO: 4094 - DNA, 17 bp, Homo sapiens
tggtggtggtcgtggct

SEQ ID NO: 4095 - DNA, 17 bp, Homo sapiens
agccacgaccaccacca

SEQ ID NO: 4096 - DNA, 121 bp, Homo sapiens
ctttgtccctgtgactctctgcatggtggtggtcgtggctaccattaagtcagtcagcttttatacccggaaggatgggcagctgtacgtatgagttttgttttattattctcaaagccag

SEQ ID NO: 4097 - DNA, 121 bp, Homo sapiens
ctggctttgagaataataaaacaaaactcatacgtacagctgcccatccttccgggtataaaagctgactgacttaatggtagccacgaccaccaccatgcagagagtcacagggacaaag

SEQ ID NO: 4098 - DNA, 17 bp, Homo sapiens
gtcagcttttatacccg

SEQ ID NO: 4099 - DNA, 17 bp, Homo sapiens
cgggtataaaagctgac

SEQ ID NO: 4100 - DNA, 121 bp, Homo sapiens
tggtgatctccattaacactgacctagggcttttgtgtttgttttattgtagaatctataccccattcacagaagataccgagactgtgggccagagagccctgcactcaattctgaatgc

SEQ ID NO: 4101 - DNA, 121 bp, Homo sapiens
gcattcagaattgagtgcagggctctctggcccacagtctcggtatcttctgtgaatggggtatagattctacaataaaacaaacacaaaagccctaggtcagtgttaatggagatcacca

SEQ ID NO: 4102 - DNA, 17 bp, Homo sapiens
aatctataccccattca

SEQ ID NO: 4103 - DNA, 17 bp, Homo sapiens
tgaatggggtatagatt

SEQ ID NO: 4104 - DNA, 121 bp, Homo sapiens
tgatctccattaacactgacctagggcttttgtgtttgttttattgtagaatctataccccattcacagaagataccgagactgtgggccagagagccctgcactcaattctgaatgctgc

SEQ ID NO: 4105 - DNA, 121 bp, Homo sapiens
gcagcattcagaattgagtgcagggctctctggcccacagtctcggtatcttctgtgaatggggtatagattctacaataaaacaaacacaaaagccctaggtcagtgttaatggagatca

SEQ ID NO: 4106 - DNA, 17 bp, Homo sapiens
ctataccccattcacag

SEQ ID NO: 4107 - DNA, 17 bp, Homo sapiens
ctgtgaatggggtatag

SEQ ID NO: 4108 - DNA, 121 bp, Homo sapiens
taacactgacctagggcttttgtgtttgttttattgtagaatctataccccattcacagaagataccgagactgtgggccagagagccctgcactcaattctgaatgctgccatcatgatc

SEQ ID NO: 4109 - DNA, 121 bp, Homo sapiens
gatcatgatggcagcattcagaattgagtgcagggctctctggcccacagtctcggtatcttctgtgaatggggtatagattctacaataaaacaaacacaaaagccctaggtcagtgtta

SEQ ID NO: 4110 - DNA, 17 bp, Homo sapiens
ttcacagaagataccga

SEQ ID NO: 4111 - DNA, 17 bp, Homo sapiens
tcggtatcttctgtgaa

SEQ ID NO: 4112 - DNA, 121 bp, Homo sapiens; identical to SEQ ID NO: 4108

SEQ ID NO: 4113 - DNA, 121 bp, Homo sapiens; identical to SEQ ID NO: 4109

SEQ ID NO: 4114 - DNA, 17 bp, Homo sapiens
ttcacagaagataccga

SEQ ID NO: 4115 - DNA, 17 bp, Homo sapiens
tcggtatcttctgtgaa

SEQ ID NO: 4116 - DNA, 121 bp, Homo sapiens
attaacactgacctagggcttttgtgtttgttttattgtagaatctataccccattcacagaagataccgagactgtgggccagagagccctgcactcaattctgaatgctgccatcatga

SEQ ID NO: 4117 - DNA, 121 bp, Homo sapiens
tcatgatggcagcattcagaattgagtgcagggctctctggcccacagtctcggtatcttctgtgaatggggtatagattctacaataaaacaaacacaaaagccctaggtcagtgttaat

SEQ ID NO: 4118 - DNA, 17 bp, Homo sapiens
cattcacagaagatacc

SEQ ID NO: 4119 - DNA, 17 bp, Homo sapiens
ggtatcttctgtgaatg

SEQ ID NO: 4120 - DNA, 121 bp, Homo sapiens
gacctagggcttttgtgtttgttttattgtagaatctataccccattcacagaagataccgagactgtgggccagagagccctgcactcaattctgaatgctgccatcatgatcagtgtca

SEQ ID NO: 4121 - DNA, 121 bp, Homo sapiens
tgacactgatcatgatggcagcattcagaattgagtgcagggctctctggcccacagtctcggtatcttctgtgaatggggtatagattctacaataaaacaaacacaaaagccctaggtc

SEQ ID NO: 4122 - DNA, 17 bp, Homo sapiens
aagataccgagactgtg

SEQ ID NO: 4123 - DNA, 17 bp, Homo sapiens
cacagtctcggtatctt

SEQ ID NO: 4124 - DNA, 121 bp, Homo sapiens
tataccccattcacagaagataccgagactgtgggccagagagccctgcactcaattctgaatgctgccatcatgatcagtgtcattgttgtcatgactatcctcctggtggttctgtata

SEQ ID NO: 4125 - DNA, 121 bp, Homo sapiens
tatacagaaccaccaggaggatagtcatgacaacaatgacactgatcatgatggcagcattcagaattgagtgcagggctctctggcccacagtctcggtatcttctgtgaatggggtata

SEQ ID NO: 4126 - DNA, 17 bp, Homo sapiens
caattctgaatgctgcc

SEQ ID NO: 4127 - DNA, 17 bp, Homo sapiens
ggcagcattcagaattg

SEQ ID NO: 4128 - DNA, 121 bp, Homo sapiens
agaagataccgagactgtgggccagagagccctgcactcaattctgaatgctgccatcatgatcagtgtcattgttgtcatgactatcctcctggtggttctgtataaatacaggtgctat

SEQ ID NO: 4129 - DNA, 121 bp, Homo sapiens
atagcacctgtatttatacagaaccaccaggaggatagtcatgacaacaatgacactgatcatgatggcagcattcagaattgagtgcagggctctctggcccacagtctcggtatcttct

SEQ ID NO: 4130 - DNA, 17 bp, Homo sapiens
gccatcatgatcagtgt

SEQ ID NO: 4131 - DNA, 17 bp, Homo sapiens
acactgatcatgatggc

SEQ ID NO: 4132 - DNA, 121 bp, Homo sapiens
cagaagataccgagactgtgggccagagagccctgcactcaattctgaatgctgccatcatgatcagtgtcattgttgtcatgactatcctcctggtggttctgtataaatacaggtgcta

SEQ ID NO: 4133 - DNA, 121 bp, Homo sapiens
tagcacctgtatttatacagaaccaccaggaggatagtcatgacaacaatgacactgatcatgatggcagcattcagaattgagtgcagggctctctggcccacagtctcggtatcttctg

SEQ ID NO: 4134 - DNA, 17 bp, Homo sapiens
tgccatcatgatcagtg

SEQ ID NO: 4135 - DNA, 17 bp, Homo sapiens
cactgatcatgatggca

SEQ ID NO: 4136 - DNA, 121 bp, Homo sapiens; identical to SEQ ID NO: 4132

SEQ ID NO: 4137 - DNA, 121 bp, Homo sapiens; identical to SEQ ID NO: 4133

SEQ ID NO: 4138 - DNA, 17 bp, Homo sapiens
tgccatcatgatcagtg

SEQ ID NO: 4139 - DNA, 17 bp, Homo sapiens
cactgatcatgatggca

SEQ ID NO: 4140 - DNA, 121 bp, Homo sapiens
acagaagataccgagactgtgggccagagagccctgcactcaattctgaatgctgccatcatgatcagtgtcattgttgtcatgactatcctcctggtggttctgtataaatacaggtgct

SEQ ID NO: 4141 - DNA, 121 bp, Homo sapiens
agcacctgtatttatacagaaccaccaggaggatagtcatgacaacaatgacactgatcatgatggcagcattcagaattgagtgcagggctctctggcccacagtctcggtatcttctgt

SEQ ID NO: 4142 - DNA, 17 bp, Homo sapiens
ctgccatcatgatcagt

SEQ ID NO: 4143 - DNA, 17 bp, Homo sapiens
actgatcatgatggcag

SEQ ID NO: 4144 - DNA, 121 bp, Homo sapiens
gagactgtgggccagagagccctgcactcaattctgaatgctgccatcatgatcagtgtcattgttgtcatgactatcctcctggtggttctgtataaatacaggtgctataaggtgagca

SEQ ID NO: 4145 - DNA, 121 bp, Homo sapiens
tgctcaccttatagcacctgtatttatacagaaccaccaggaggatagtcatgacaacaatgacactgatcatgatggcagcattcagaattgagtgcagggctctctggcccacagtctc

SEQ ID NO: 4146 - DNA, 17 bp, Homo sapiens
tcagtgtcattgttgtc

SEQ ID NO: 4147 - DNA, 17 bp, Homo sapiens
gacaacaatgacactga

SEQ ID NO: 4148 - DNA, 121 bp, Homo sapiens
agactgtgggccagagagccctgcactcaattctgaatgctgccatcatgatcagtgtcattgttgtcatgactatcctcctggtggttctgtataaatacaggtgctataaggtgagcat

SEQ ID NO: 4149 - DNA, 121 bp, Homo sapiens
atgctcaccttatagcacctgtatttatacagaaccaccaggaggatagtcatgacaacaatgacactgatcatgatggcagcattcagaattgagtgcagggctctctggcccacagtct

SEQ ID NO: 4150 - DNA, 17 bp, Homo sapiens
cagtgtcattgttgtca

SEQ ID NO: 4151 - DNA, 17 bp, Homo sapiens
tgacaacaatgacactg

SEQ ID NO: 4152 - DNA, 121 bp, Homo sapiens
ccagagagccctgcactcaattctgaatgctgccatcatgatcagtgtcattgttgtcatgactatcctcctggtggttctgtataaatacaggtgctataaggtgagcatgagacacaga

SEQ ID NO: 4153 - DNA, 121 bp, Homo sapiens
tctgtgtctcatgctcaccttatagcacctgtatttatacagaaccaccaggaggatagtcatgacaacaatgacactgatcatgatggcagcattcagaattgagtgcagggctctctgg

SEQ ID NO: 4154 - DNA, 17 bp, Homo sapiens
gttgtcatgactatcct

SEQ ID NO: 4155 - DNA, 17 bp, Homo sapiens
aggatagtcatgacaac

SEQ ID NO: 4156 - DNA, 121 bp, Homo sapiens; identical to SEQ ID NO: 4152

SEQ ID NO: 4157 - DNA, 121 bp, Homo sapiens; identical to SEQ ID NO: 4153

SEQ ID NO: 4158 - DNA, 17 bp, Homo sapiens
gttgtcatgactatcct

SEQ ID NO: 4159 - DNA, 17 bp, Homo sapiens
aggatagtcatgacaac

SEQ ID NO: 4160 - DNA, 121 bp, Homo sapiens
ggccagagagccctgcactcaattctgaatgctgccatcatgatcagtgtcattgttgtcatgactatcctcctggtggttctgtataaatacaggtgctataaggtgagcatgagacaca

SEQ ID NO: 4161 - DNA, 121 bp, Homo sapiens
tgtgtctcatgctcaccttatagcacctgtatttatacagaaccaccaggaggatagtcatgacaacaatgacactgatcatgatggcagcattcagaattgagtgcagggctctctggcc

SEQ ID NO: 4162 - DNA, 17 bp, Homo sapiens
ttgttgtcatgactatc

SEQ ID NO: 4163 - DNA, 17 bp, Homo sapiens
gatagtcatgacaacaa

SEQ ID NO: 4164 - DNA, 121 bp, Homo sapiens; identical to SEQ ID NO: 4160

SEQ ID NO: 4165 - DNA, 121 bp, Homo sapiens; identical to SEQ ID NO: 4161

SEQ ID NO: 4166 - DNA, 17 bp, Homo sapiens
ttgttgtcatgactatc

SEQ ID NO: 4167 - DNA, 17 bp, Homo sapiens
gatagtcatgacaacaa

SEQ ID NO: 4168 - DNA, 121 bp, Homo sapiens
agagagccctgcactcaattctgaatgctgccatcatgatcagtgtcattgttgtcatgactatcctcctggtggttctgtataaatacaggtgctataaggtgagcatgagacacagatc

SEQ ID NO: 4169 - DNA, 121 bp, Homo sapiens
gatctgtgtctcatgctcaccttatagcacctgtatttatacagaaccaccaggaggatagtcatgacaacaatgacactgatcatgatggcagcattcagaattgagtgcagggctctct

SEQ ID NO: 4170 - DNA, 17 bp, Homo sapiens
tgtcatgactatcctcc

SEQ ID NO: 4171 - DNA, 17 bp, Homo sapiens
ggaggatagtcatgaca

SEQ ID NO: 4172 - DNA, 121 bp, Homo sapiens
ctttttaagggttgtgggacctgttaattatattgaaatgctttcttttctaggtcatccatgcctggcttattatatcatctctattgttgctgttctttttttcattcatttacttggg

SEQ ID NO: 4173 - DNA, 121 bp, Homo sapiens
cccaagtaaatgaatgaaaaaaagaacagcaacaatagagatgatataataagccaggcatggatgacctagaaaagaaagcatttcaatataattaacaggtcccacaacccttaaaaag

SEQ ID NO: 4174 - DNA, 17 bp, Homo sapiens
ggtcatccatgcctggc

SEQ ID NO: 4175 - DNA, 17 bp, Homo sapiens
gccaggcatggatgacc

SEQ ID NO: 4176 - DNA, 121 bp, Homo sapiens
actttttaagggttgtgggacctgttaattatattgaaatgctttcttttctaggtcatccatgcctggcttattatatcatctctattgttgctgttctttttttcattcatttacttgg

SEQ ID NO: 4177 - DNA, 121 bp, Homo sapiens
ccaagtaaatgaatgaaaaaaagaacagcaacaatagagatgatataataagccaggcatggatgacctagaaaagaaagcatttcaatataattaacaggtcccacaacccttaaaaagt

SEQ ID NO: 4178 - DNA, 17 bp, Homo sapiens
aggtcatccatgcctgg

SEQ ID NO: 4179 - DNA, 17 bp, Homo sapiens
ccaggcatggatgacct

SEQ ID NO: 4180 - DNA, 121 bp, Homo sapiens
agggttgtgggacctgttaattatattgaaatgctttcttttctaggtcatccatgcctggcttattatatcatctctattgttgctgttctttttttcattcatttacttggggtaagtt

SEQ ID NO: 4181 - DNA, 121 bp, Homo sapiens
aacttaccccaagtaaatgaatgaaaaaaagaacagcaacaatagagatgatataataagccaggcatggatgacctagaaaagaaagcatttcaatataattaacaggtcccacaaccct

SEQ ID NO: 4182 - DNA, 17 bp, Homo sapiens
catgcctggcttattat

SEQ ID NO: 4183 - DNA, 17 bp, Homo sapiens
ataataagccaggcatg

SEQ ID NO: 4184 - DNA, 121 bp, Homo sapiens
acctgttaattatattgaaatgctttcttttctaggtcatccatgcctggcttattatatcatctctattgttgctgttctttttttcattcatttacttggggtaagttgtgaaattttt

SEQ ID NO: 4185 - DNA, 121 bp, Homo sapiens
aaaaatttcacaacttaccccaagtaaatgaatgaaaaaaagaacagcaacaatagagatgatataataagccaggcatggatgacctagaaaagaaagcatttcaatataattaacaggt

SEQ ID NO: 4186 - DNA, 17 bp, Homo sapiens
tattatatcatctctat

SEQ ID NO: 4187 - DNA, 17 bp, Homo sapiens
atagagatgatataata

SEQ ID NO: 4188 - DNA, 121 bp, Homo sapiens
taattatattgaaatgctttcttttctaggtcatccatgcctggcttattatatcatctctattgttgctgttctttttttcattcatttacttggggtaagttgtgaaatttttggtctg

SEQ ID NO: 4189 - DNA, 121 bp, Homo sapiens
cagaccaaaaatttcacaacttaccccaagtaaatgaatgaaaaaaagaacagcaacaatagagatgatataataagccaggcatggatgacctagaaaagaaagcatttcaatataatta

SEQ ID NO: 4190 - DNA, 17 bp, Homo sapiens
atcatctctattgttgc

SEQ ID NO: 4191 - DNA, 17 bp, Homo sapiens
gcaacaatagagatgat

SEQ ID NO: 4192 - DNA, 121 bp, Homo sapiens
tattgaaatgctttcttttctaggtcatccatgcctggcttattatatcatctctattgttgctgttctttttttcattcatttacttggggtaagttgtgaaatttttggtctgtctttc

SEQ ID NO: 4193 - DNA, 121 bp, Homo sapiens
gaaagacagaccaaaaatttcacaacttaccccaagtaaatgaatgaaaaaaagaacagcaacaatagagatgatataataagccaggcatggatgacctagaaaagaaagcatttcaata

SEQ ID NO: 4194 - DNA, 17 bp, Homo sapiens
tctattgttgctgttct

SEQ ID NO: 4195 - DNA, 17 bp, Homo sapiens
agaacagcaacaataga

SEQ ID NO: 4196 - DNA, 121 bp, Homo sapiens
tataacgttgctgtggactacattactgttgcactcctgatctggaattttggtgtggtgggaatgatttccattcactggaaaggtccacttcgactccagcaggcatatctcattatga

SEQ ID NO: 4197 - DNA, 121 bp, Homo sapiens
tcataatgagatatgcctgctggagtcgaagtggacctttccagtgaatggaaatcattcccaccacaccaaaattccagatcaggagtgcaacagtaatgtagtccacagcaacgttata

SEQ ID NO: 4198 - DNA, 17 bp, Homo sapiens
gtgtggtgggaatgatt

SEQ ID NO: 4199 - DNA, 17 bp, Homo sapiens
aatcattcccaccacac

SEQ ID NO: 4200 - DNA, 121 bp, Homo sapiens
ataacgttgctgtggactacattactgttgcactcctgatctggaattttggtgtggtgggaatgatttccattcactggaaaggtccacttcgactccagcaggcatatctcattatgat

SEQ ID NO: 4201 - DNA, 121 bp, Homo sapiens
atcataatgagatatgcctgctggagtcgaagtggacctttccagtgaatggaaatcattcccaccacaccaaaattccagatcaggagtgcaacagtaatgtagtccacagcaacgttat

SEQ ID NO: 4202 - DNA, 17 bp, Homo sapiens
tgtggtgggaatgattt

SEQ ID NO: 4203 - DNA, 17 bp, Homo sapiens
aaatcattcccaccaca

SEQ ID NO: 4204 - DNA, 121 bp, Homo sapiens
tggactacattactgttgcactcctgatctggaattttggtgtggtgggaatgatttccattcactggaaaggtccacttcgactccagcaggcatatctcattatgattagtgccctcat

SEQ ID NO: 4205 - DNA, 121 bp, Homo sapiens
atgagggcactaatcataatgagatatgcctgctggagtcgaagtggacctttccagtgaatggaaatcattcccaccacaccaaaattccagatcaggagtgcaacagtaatgtagtcca

SEQ ID NO: 4206 - DNA, 17 bp, Homo sapiens
gatttccattcactgga

SEQ ID NO: 4207 - DNA, 17 bp, Homo sapiens
tccagtgaatggaaatc

SEQ ID NO: 4208 - DNA, 121 bp, Homo sapiens
cactcctgatctggaattttggtgtggtgggaatgatttccattcactggaaaggtccacttcgactccagcaggcatatctcattatgattagtgccctcatggccctggtgtttatcaa

SEQ ID NO: 4209 - DNA, 121 bp, Homo sapiens
ttgataaacaccagggccatgagggcactaatcataatgagatatgcctgctggagtcgaagtggacctttccagtgaatggaaatcattcccaccacaccaaaattccagatcaggagtg

SEQ ID NO: 4210 - DNA, 17 bp, Homo sapiens
aggtccacttcgactcc

SEQ ID NO: 4211 - DNA, 17 bp, Homo sapiens
ggagtcgaagtggacct

SEQ ID NO: 4212 - DNA, 121 bp, Homo sapiens
atttccattcactggaaaggtccacttcgactccagcaggcatatctcattatgattagtgccctcatggccctggtgtttatcaagtacctccctgaatggactgcgtggctcatcttgg

SEQ ID NO: 4213 - DNA, 121 bp, Homo sapiens
ccaagatgagccacgcagtccattcagggaggtacttgataaacaccagggccatgagggcactaatcataatgagatatgcctgctggagtcgaagtggacctttccagtgaatggaaat

SEQ ID NO: 4214 - DNA, 17 bp, Homo sapiens
tgattagtgccctcatg

SEQ ID NO: 4215 - DNA, 17 bp, Homo sapiens
catgagggcactaatca

SEQ ID NO: 4216 - DNA, 121 bp, Homo sapiens
tttccattcactggaaaggtccacttcgactccagcaggcatatctcattatgattagtgccctcatggccctggtgtttatcaagtacctccctgaatggactgcgtggctcatcttggc

SEQ ID NO: 4217 - DNA, 121 bp, Homo sapiens
gccaagatgagccacgcagtccattcagggaggtacttgataaacaccagggccatgagggcactaatcataatgagatatgcctgctggagtcgaagtggacctttccagtgaatggaaa

SEQ ID NO: 4218 - DNA, 17 bp, Homo sapiens
gattagtgccctcatgg

SEQ ID NO: 4219 - DNA, 17 bp, Homo sapiens
ccatgagggcactaatc

SEQ ID NO: 4220 - DNA, 121 bp, Homo sapiens
ttcactggaaaggtccacttcgactccagcaggcatatctcattatgattagtgccctcatggccctggtgtttatcaagtacctccctgaatggactgcgtggctcatcttggctgtgat

SEQ ID NO: 4221 - DNA, 121 bp, Homo sapiens
atcacagccaagatgagccacgcagtccattcagggaggtacttgataaacaccagggccatgagggcactaatcataatgagatatgcctgctggagtcgaagtggacctttccagtgaa

SEQ ID NO: 4222 - DNA, 17 bp, Homo sapiens
tgccctcatggccctgg

SEQ ID NO: 4223 - DNA, 17 bp, Homo sapiens
ccagggccatgagggca

SEQ ID NO: 4224 - DNA, 121 bp, Homo sapiens
ggaaaggtccacttcgactccagcaggcatatctcattatgattagtgccctcatggccctggtgtttatcaagtacctccctgaatggactgcgtggctcatcttggctgtgatttcagt

SEQ ID NO: 4225 - DNA, 121 bp, Homo sapiens
actgaaatcacagccaagatgagccacgcagtccattcagggaggtacttgataaacaccagggccatgagggcactaatcataatgagatatgcctgctggagtcgaagtggacctttcc

SEQ ID NO: 4226 - DNA, 17 bp, Homo sapiens
catggccctggtgttta

SEQ ID NO: 4227 - DNA, 17 bp, Homo sapiens
taaacaccagggccatg

SEQ ID NO: 4228 - DNA, 121 bp, Homo sapiens
tcattatgattagtgccctcatggccctggtgtttatcaagtacctccctgaatggactgcgtggctcatcttggctgtgatttcagtatatggtaaaacccaagactgataatttgtttg

SEQ ID NO: 4229 - DNA, 121 bp, Homo sapiens
caaacaaattatcagtcttgggttttaccatatactgaaatcacagccaagatgagccacgcagtccattcagggaggtacttgataaacaccagggccatgagggcactaatcataatga

SEQ ID NO: 4230 - DNA, 17 bp, Homo sapiens
atggactgcgtggctca

SEQ ID NO: 4231 - DNA, 17 bp, Homo sapiens
tgagccacgcagtccat

SEQ ID NO: 4232 - DNA, 121 bp, Homo sapiens
gtgccctcatggccctggtgtttatcaagtacctccctgaatggactgcgtggctcatcttggctgtgatttcagtatatggtaaaacccaagactgataatttgtttgtcacaggaatgc

SEQ ID NO: 4233 - DNA, 121 bp, Homo sapiens
gcattcctgtgacaaacaaattatcagtcttgggttttaccatatactgaaatcacagccaagatgagccacgcagtccattcagggaggtacttgataaacaccagggccatgagggcac

SEQ ID NO: 4234 - DNA, 17 bp, Homo sapiens
gctcatcttggctgtga

SEQ ID NO: 4235 - DNA, 17 bp, Homo sapiens
tcacagccaagatgagc

SEQ ID NO: 4236 - DNA, 121 bp, Homo sapiens
agtttagcccatacattttattagatgtcttttatgtttttctttttctagatttagtggctgttttgtgtccgaaaggtccacttcgtatgctggttgaaacagctcaggagagaaatga

SEQ ID NO: 4237 - DNA, 121 bp, Homo sapiens
tcatttctctcctgagctgtttcaaccagcatacgaagtggacctttcggacacaaaacagccactaaatctagaaaaagaaaaacataaaagacatctaataaaatgtatgggctaaact

SEQ ID NO: 4238 - DNA, 17 bp, Homo sapiens
tttagtggctgttttgt

SEQ ID NO: 4239 - DNA, 17 bp, Homo sapiens
acaaaacagccactaaa

SEQ ID NO: 4240 - DNA, 121 bp, Homo sapiens
cccatacattttattagatgtcttttatgtttttctttttctagatttagtggctgttttgtgtccgaaaggtccacttcgtatgctggttgaaacagctcaggagagaaatgaaacgctt

SEQ ID NO: 4241 - DNA, 121 bp, Homo sapiens
aagcgtttcatttctctcctgagctgtttcaaccagcatacgaagtggacctttcggacacaaaacagccactaaatctagaaaaagaaaaacataaaagacatctaataaaatgtatggg

SEQ ID NO: 4242 - DNA, 17 bp, Homo sapiens
gctgttttgtgtccgaa

SEQ ID NO: 4243 - DNA, 17 bp, Homo sapiens
ttcggacacaaaacagc

SEQ ID NO: 4244 - DNA, 121 bp, Homo sapiens
ccatacattttattagatgtcttttatgtttttctttttctagatttagtggctgttttgtgtccgaaaggtccacttcgtatgctggttgaaacagctcaggagagaaatgaaacgcttt

SEQ ID NO: 4245 - DNA, 121 bp, Homo sapiens
aaagcgtttcatttctctcctgagctgtttcaaccagcatacgaagtggacctttcggacacaaaacagccactaaatctagaaaaagaaaaacataaaagacatctaataaaatgtatgg

SEQ ID NO: 4246 - DNA, 17 bp, Homo sapiens
ctgttttgtgtccgaaa

SEQ ID NO: 4247 - DNA, 17 bp, Homo sapiens
tttcggacacaaaacag

SEQ ID NO: 4248 - DNA, 121 bp, Homo sapiens
acattttattagatgtcttttatgtttttctttttctagatttagtggctgttttgtgtccgaaaggtccacttcgtatgctggttgaaacagctcaggagagaaatgaaacgctttttcc

SEQ ID NO: 4249 - DNA, 121 bp, Homo sapiens
ggaaaaagcgtttcatttctctcctgagctgtttcaaccagcatacgaagtggacctttcggacacaaaacagccactaaatctagaaaaagaaaaacataaaagacatctaataaaatgt

SEQ ID NO: 4250 - DNA, 17 bp, Homo sapiens
tttgtgtccgaaaggtc

SEQ ID NO: 4251 - DNA, 17 bp, Homo sapiens
gacctttcggacacaaa

SEQ ID NO: 4252 - DNA, 121 bp, Homo sapiens
gtcttttatgtttttctttttctagatttagtggctgttttgtgtccgaaaggtccacttcgtatgctggttgaaacagctcaggagagaaatgaaacgctttttccagctctcatttact

SEQ ID NO: 4253 - DNA, 121 bp, Homo sapiens
agtaaatgagagctggaaaaagcgtttcatttctctcctgagctgtttcaaccagcatacgaagtggacctttcggacacaaaacagccactaaatctagaaaaagaaaaacataaaagac

SEQ ID NO: 4254 - DNA, 17 bp, Homo sapiens
gtccacttcgtatgctg

SEQ ID NO: 4255 - DNA, 17 bp, Homo sapiens
cagcatacgaagtggac

SEQ ID NO: 4256 - DNA, 121 bp, Homo sapiens
tcttttatgtttttctttttctagatttagtggctgttttgtgtccgaaaggtccacttcgtatgctggttgaaacagctcaggagagaaatgaaacgctttttccagctctcatttactc

SEQ ID NO: 4257 - DNA, 121 bp, Homo sapiens
gagtaaatgagagctggaaaaagcgtttcatttctctcctgagctgtttcaaccagcatacgaagtggacctttcggacacaaaacagccactaaatctagaaaaagaaaaacataaaaga

SEQ ID NO: 4258 - DNA, 17 bp, Homo sapiens
tccacttcgtatgctgg

SEQ ID NO: 4259 - DNA, 17 bp, Homo sapiens
ccagcatacgaagtgga

SEQ ID NO: 4260 - DNA, 121 bp, Homo sapiens
tagtggctgttttgtgtccgaaaggtccacttcgtatgctggttgaaacagctcaggagagaaatgaaacgctttttccagctctcatttactcctgtaagtatttgagaatgatattgaa

SEQ ID NO: 4261 - DNA, 121 bp, Homo sapiens
ttcaatatcattctcaaatacttacaggagtaaatgagagctggaaaaagcgtttcatttctctcctgagctgtttcaaccagcatacgaagtggacctttcggacacaaaacagccacta

SEQ ID NO: 4262 - DNA, 17 bp, Homo sapiens
tcaggagagaaatgaaa

SEQ ID NO: 4263 - DNA, 17 bp, Homo sapiens
tttcatttctctcctga

SEQ ID NO: 4264 - DNA, 121 bp, Homo sapiens
ctgttttgtgtccgaaaggtccacttcgtatgctggttgaaacagctcaggagagaaatgaaacgctttttccagctctcatttactcctgtaagtatttgagaatgatattgaattagta

SEQ ID NO: 4265 - DNA, 121 bp, Homo sapiens
tactaattcaatatcattctcaaatacttacaggagtaaatgagagctggaaaaagcgtttcatttctctcctgagctgtttcaaccagcatacgaagtggacctttcggacacaaaacag

SEQ ID NO: 4266 - DNA, 17 bp, Homo sapiens
gagaaatgaaacgcttt

SEQ ID NO: 4267 - DNA, 17 bp, Homo sapiens
aaagcgtttcatttctc

SEQ ID NO: 4268 - DNA, 121 bp, Homo sapiens; identical to SEQ ID NO: 4264

SEQ ID NO: 4269 - DNA, 121 bp, Homo sapiens; identical to SEQ ID NO: 4265

SEQ ID NO: 4270 - DNA, 17 bp, Homo sapiens
gagaaatgaaacgcttt

SEQ ID NO: 4271 - DNA, 17 bp, Homo sapiens
aaagcgtttcatttctc

SEQ ID NO: 4272 - DNA, 121 bp, Homo sapiens
tgtgtccgaaaggtccacttcgtatgctggttgaaacagctcaggagagaaatgaaacgctttttccagctctcatttactcctgtaagtatttgagaatgatattgaattagtaatcagt

SEQ ID NO: 4273 - DNA, 121 bp, Homo sapiens
actgattactaattcaatatcattctcaaatacttacaggagtaaatgagagctggaaaaagcgtttcatttctctcctgagctgtttcaaccagcatacgaagtggacctttcggacaca

SEQ ID NO: 4274 - DNA, 17 bp, Homo sapiens
tgaaacgctttttccag

SEQ ID NO: 4275 - DNA, 17 bp, Homo sapiens
ctggaaaaagcgtttca

SEQ ID NO: 4276 - DNA, 121 bp, Homo sapiens
aaggtccacttcgtatgctggttgaaacagctcaggagagaaatgaaacgctttttccagctctcatttactcctgtaagtatttgagaatgatattgaattagtaatcagtgtagaattt

SEQ ID NO: 4277 - DNA, 121 bp, Homo sapiens
aaattctacactgattactaattcaatatcattctcaaatacttacaggagtaaatgagagctggaaaaagcgtttcatttctctcctgagctgtttcaaccagcatacgaagtggacctt

SEQ ID NO: 4278 - DNA, 17 bp, Homo sapiens
ttttccagctctcattt

SEQ ID NO: 4279 - DNA, 17 bp, Homo sapiens
aaatgagagctggaaaa

SEQ ID NO: 4280 - DNA, 121 bp, Homo sapiens
ggtccacttcgtatgctggttgaaacagctcaggagagaaatgaaacgctttttccagctctcatttactcctgtaagtatttgagaatgatattgaattagtaatcagtgtagaatttat

SEQ ID NO: 4281 - DNA, 121 bp, Homo sapiens
ataaattctacactgattactaattcaatatcattctcaaatacttacaggagtaaatgagagctggaaaaagcgtttcatttctctcctgagctgtttcaaccagcatacgaagtggacc

SEQ ID NO: 4282 - DNA, 17 bp, Homo sapiens
ttccagctctcatttac

SEQ ID NO: 4283 - DNA, 17 bp, Homo sapiens
gtaaatgagagctggaa

SEQ ID NO: 4284 - DNA, 121 bp, Homo sapiens
gtgaccaactttttaatatttgtaacctttcctttttagggggagtaaaacttggattgggagatttcattttctacagtgttctggttggtaaagcctcagcaacagccagtggagactg

SEQ ID NO: 4285 - DNA, 121 bp, Homo sapiens
cagtctccactggctgttgctgaggctttaccaaccagaacactgtagaaaatgaaatctcccaatccaagttttactccccctaaaaaggaaaggttacaaatattaaaaagttggtcac

SEQ ID NO: 4286 - DNA, 17 bp, Homo sapiens
tggattgggagatttca

SEQ ID NO: 4287 - DNA, 17 bp, Homo sapiens
tgaaatctcccaatcca

SEQ ID NO: 4288 - DNA, 121 bp, Homo sapiens
tttgtaacctttcctttttagggggagtaaaacttggattgggagatttcattttctacagtgttctggttggtaaagcctcagcaacagccagtggagactggaacacaaccatagcctg

SEQ ID NO: 4289 - DNA, 121 bp, Homo sapiens
caggctatggttgtgttccagtctccactggctgttgctgaggctttaccaaccagaacactgtagaaaatgaaatctcccaatccaagttttactccccctaaaaaggaaaggttacaaa

SEQ ID NO: 4290 - DNA, 17 bp, Homo sapiens
tttctacagtgttctgg

SEQ ID NO: 4291 - DNA, 17 bp, Homo sapiens
ccagaacactgtagaaa

SEQ ID NO: 4292 - DNA, 121 bp, Homo sapiens
aacctttcctttttagggggagtaaaacttggattgggagatttcattttctacagtgttctggttggtaaagcctcagcaacagccagtggagactggaacacaaccatagcctgtttcg

SEQ ID NO: 4293 - DNA, 121 bp, Homo sapiens
cgaaacaggctatggttgtgttccagtctccactggctgttgctgaggctttaccaaccagaacactgtagaaaatgaaatctcccaatccaagttttactccccctaaaaaggaaaggtt

SEQ ID NO: 4294 - DNA, 17 bp, Homo sapiens
acagtgttctggttggt

SEQ ID NO: 4295 - DNA, 17 bp, Homo sapiens
accaaccagaacactgt

SEQ ID NO: 4296 - DNA, 121 bp, Homo sapiens
atttcattttctacagtgttctggttggtaaagcctcagcaacagccagtggagactggaacacaaccatagcctgtttcgtagccatattaattgtaagtatacactaataagaatgtgt

SEQ ID NO: 4297 - DNA, 121 bp, Homo sapiens
acacattcttattagtgtatacttacaattaatatggctacgaaacaggctatggttgtgttccagtctccactggctgttgctgaggctttaccaaccagaacactgtagaaaatgaaat

SEQ ID NO: 4298 - DNA, 17 bp, Homo sapiens
agactggaacacaacca

SEQ ID NO: 4299 - DNA, 17 bp, Homo sapiens
tggttgtgttccagtct

SEQ ID NO: 4300 - DNA, 121 bp, Homo sapiens
tacagtgttctggttggtaaagcctcagcaacagccagtggagactggaacacaaccatagcctgtttcgtagccatattaattgtaagtatacactaataagaatgtgtcagagctctta

SEQ ID NO: 4301 - DNA, 121 bp, Homo sapiens
taagagctctgacacattcttattagtgtatacttacaattaatatggctacgaaacaggctatggttgtgttccagtctccactggctgttgctgaggctttaccaaccagaacactgta

SEQ ID NO: 4302 - DNA, 17 bp, Homo sapiens
caaccatagcctgtttc

SEQ ID NO: 4303 - DNA, 17 bp, Homo sapiens
gaaacaggctatggttg

SEQ ID NO: 4304 - DNA, 121 bp, Homo sapiens
gtgttctggttggtaaagcctcagcaacagccagtggagactggaacacaaccatagcctgtttcgtagccatattaattgtaagtatacactaataagaatgtgtcagagctcttaatgt

SEQ ID NO: 4305 - DNA, 121 bp, Homo sapiens
acattaagagctctgacacattcttattagtgtatacttacaattaatatggctacgaaacaggctatggttgtgttccagtctccactggctgttgctgaggctttaccaaccagaacac

SEQ ID NO: 4306 - DNA, 17 bp, Homo sapiens
catagcctgtttcgtag

SEQ ID NO: 4307 - DNA, 17 bp, Homo sapiens
ctacgaaacaggctatg

SEQ ID NO: 4308 - DNA, 121 bp, Homo sapiens
tgtgaatgtgtgtctttcccatcttctccacagggtttgtgccttacattattactccttgccattttcaagaaagcattgccagctcttccaatctccatcacctttgggcttgttttct

SEQ ID NO: 4309 - DNA, 121 bp, Homo sapiens
agaaaacaagcccaaaggtgatggagattggaagagctggcaatgctttcttgaaaatggcaaggagtaataatgtaaggcacaaaccctgtggagaagatgggaaagacacacattcaca

SEQ ID NO: 4310 - DNA, 17 bp, Homo sapiens
tactccttgccattttc

SEQ ID NO: 4311 - DNA, 17 bp, Homo sapiens
gaaaatggcaaggagta

SEQ ID NO: 4312 - DNA, 121 bp, Homo sapiens
agggtttgtgccttacattattactccttgccattttcaagaaagcattgccagctcttccaatctccatcacctttgggcttgttttctactttgccacagattatcttgtacagccttt

SEQ ID NO: 4313 - DNA, 121 bp, Homo sapiens
aaaggctgtacaagataatctgtggcaaagtagaaaacaagcccaaaggtgatggagattggaagagctggcaatgctttcttgaaaatggcaaggagtaataatgtaaggcacaaaccct

SEQ ID NO: 4314 - DNA, 17 bp, Homo sapiens
agctcttccaatctcca

SEQ ID NO: 4315 - DNA, 17 bp, Homo sapiens
tggagattggaagagct

SEQ ID NO: 4316 - DNA, 121 bp, Homo sapiens
cagggtttgtgccttacattattactccttgccattttcaagaaagcattgccagctcttccaatctccatcacctttgggcttgttttctactttgccacagattatcttgtacagcctt

SEQ ID NO: 4317 - DNA, 121 bp, Homo sapiens
aaggctgtacaagataatctgtggcaaagtagaaaacaagcccaaaggtgatggagattggaagagctggcaatgctttcttgaaaatggcaaggagtaataatgtaaggcacaaaccctg

SEQ ID NO: 4318 - DNA, 17 bp, Homo sapiens
cagctcttccaatctcc

SEQ ID NO: 4319 - DNA, 17 bp, Homo sapiens
ggagattggaagagctg

SEQ ID NO: 4320 - DNA, 121 bp, Homo sapiens
gatgtggtttcccacagagaagccaggagaacgaggaggacggtgaggaggaccctgaccgctatgtctgtagtggggttcccgggcggccgccaggcctggaggaagagctgaccctcaa

SEQ ID NO: 4321 - DNA, 121 bp, Homo sapiens
ttgagggtcagctcttcctccaggcctggcggccgcccgggaaccccactacagacatagcggtcagggtcctcctcaccgtcctcctcgttctcctggcttctctgtgggaaaccacatc

SEQ ID NO: 4322 - DNA, 17 bp, Homo sapiens
ccctgaccgctatgtct

SEQ ID NO: 4323 - DNA, 17 bp, Homo sapiens
agacatagcggtcaggg

SEQ ID NO: 4324 - DNA, 121 bp, Homo sapiens
gcctcgaggagcagtcagggccgggagcatcagccctttgccttctccctcagcatctacacgacattcactgaggacacaccctcggtgggccagcgcctcctcaactccgtgctgaaca

SEQ ID NO: 4325 - DNA, 121 bp, Homo sapiens
tgttcagcacggagttgaggaggcgctggcccaccgagggtgtgtcctcagtgaatgtcgtgtagatgctgagggagaaggcaaagggctgatgctcccggccctgactgctcctcgaggc

SEQ ID NO: 4326 - DNA, 17 bp, Homo sapiens
gcatctacacgacattc

SEQ ID NO: 4327 - DNA, 17 bp, Homo sapiens
gaatgtcgtgtagatgc

SEQ ID NO: 4328 - DNA, 121 bp, Homo sapiens
acacgccattcactgaggacacaccctcggtgggccagcgcctcctcaactccgtgctgaacaccctcatcatgatcagcgtcatcgtggttatgaccatcttcttggtggtgctctacaa

SEQ ID NO: 4329 - DNA, 121 bp, Homo sapiens
ttgtagagcaccaccaagaagatggtcataaccacgatgacgctgatcatgatgagggtgttcagcacggagttgaggaggcgctggcccaccgagggtgtgtcctcagtgaatggcgtgt

SEQ ID NO: 4330 - DNA, 17 bp, Homo sapiens
cgtgctgaacaccctca

SEQ ID NO: 4331 - DNA, 17 bp, Homo sapiens
tgagggtgttcagcacg

SEQ ID NO: 4332 - DNA, 121 bp, Homo sapiens
ccactggaagggccctctggtgctgcagcaggcctacctcatcatgatcagtgcgctcatggccctagtgttcatcaagtacctcccagagtggtccgcgtgggtcatcctgggcgccatc

SEQ ID NO: 4333 - DNA, 121 bp, Homo sapiens
gatggcgcccaggatgacccacgcggaccactctgggaggtacttgatgaacactagggccatgagcgcactgatcatgatgaggtaggcctgctgcagcaccagagggcccttccagtgg

SEQ ID NO: 4334 - DNA, 17 bp, Homo sapiens
gcgctcatggccctagt

SEQ ID NO: 4335 - DNA, 17 bp, Homo sapiens
actagggccatgagcgc

SEQ ID NO: 4336 - DNA, 121 bp, Homo sapiens
atccactggaagggccctctggtgctgcagcaggcctacctcatcatgatcagtgcgctcatggccctagtgttcatcaagtacctcccagagtggtccgcgtgggtcatcctgggcgcca

SEQ ID NO: 4337 - DNA, 121 bp, Homo sapiens
tggcgcccaggatgacccacgcggaccactctgggaggtacttgatgaacactagggccatgagcgcactgatcatgatgaggtaggcctgctgcagcaccagagggcccttccagtggat

SEQ ID NO: 4338 - DNA, 17 bp, Homo sapiens
gtgcgctcatggcccta

SEQ ID NO: 4339 - DNA, 17 bp, Homo sapiens
tagggccatgagcgcac

SEQ ID NO: 4340 - DNA, 121 bp, Homo sapiens
ttgactgaatgcttattttggcctgtgtctctccctctttctcagatataacagtttgtgcccatgaccacatcagctggcatctgctgggaatgagctcggggccagaattattctccat

SEQ ID NO: 4341 - DNA, 42 bp, Artificial Sequence
  CDS (1)..(42)
  Description of Artificial Sequence: Synthetic hygromycin nucleotide sequence
gatgtaggagggcgtggatatgtcctgcgggtaaatagctgc

SEQ ID NO: 4342 - DNA, 42 bp, Artificial Sequence
  CDS (1)..(18)
  Description of Artificial Sequence: Synthetic hygromycin nucleotide sequence
gatgtaggagggcgtggataggtcctgcgggtaaatagctgc

SEQ ID NO: 4343 - DNA, 41 bp, Artificial Sequence
  CDS (1)..(18)
  Description of Artificial Sequence: Synthetic hygromycin nucleotide sequence
gatgtaggagggcgtggatagtcctgcgggtaaatagctgc

SEQ ID NO: 4344 - DNA, 42 bp, Artificial Sequence
  CDS (1)..(18)
  Description of Artificial Sequence: Synthetic hygromycin nucleotide sequence
gatgtaggagggcgtggataagtcctgcgggtaaatagctgc

SEQ ID NO: 4345 - protein, 14 aa, Artificial Sequence
  Description of Artificial Sequence: Synthetic hygromycin peptide sequence
DVGGRGYVLRVNSC

SEQ ID NO: 4346 - protein, 6 aa, Artificial Sequence
  Description of Artificial Sequence: Synthetic hygromycin peptide sequence
DVGGRG

SEQ ID NO: 4347 - DNA, 42 bp, Artificial Sequence
  Description of Artificial Sequence: Synthetic hygromycin nucleotide sequence
gatgtaggagggcgtggatacgtcctgcgggtaaatagctgc

SEQ ID NO: 4348 - DNA, 74 bp, Artificial Sequence
  Description of Artificial Sequence: Synthetic oligonucleotide
  misc_feature (1)..(2): phosphorothioate linkage
  misc_feature (2)..(3): phosphorothioate linkage
  misc_feature (3)..(4): phosphorothioate linkage
  misc_feature (71)..(72): phosphorothioate linkage
  misc_feature (72)..(73): phosphorothioate linkage
  misc_feature (73)..(74): phosphorothioate linkage
gtagaaaccatcggcgcagctatttacccgcaggacgtatccacgccctcctacatcgaagctgaaagcacgag

SEQ ID NO: 4349 - DNA, 54 bp, Homo sapiens
atggtgcacctgactcctgtggagaagtctgccgttactgccctgtggggcaag

SEQ ID NO: 4350 - DNA, 71 bp, Artificial Sequence
  Description of Artificial Sequence: Synthetic oligonucleotide
  misc_feature (1)..(2): phosphorothioate linkage
  misc_feature (2)..(3): phosphorothioate linkage
  misc_feature (3)..(4): phosphorothioate linkage
  misc_feature (68)..(69): phosphorothioate linkage
  misc_feature (69)..(70): phosphorothioate linkage
  misc_feature (70)..(71): phosphorothioate linkage
gcctcaccaccaacttcatccacgttcaccttgcctcacagggcagtaacggcagacttctccacaggagt

SEQ ID NO: 4351 - DNA, 71 bp, Artificial Sequence
  Description of Artificial Sequence: Synthetic oligonucleotide
  misc_feature (1)..(2): phosphorothioate linkage
  misc_feature (2)..(3): phosphorothioate linkage
  misc_feature (3)..(4): phosphorothioate linkage
  misc_feature (68)..(69): phosphorothioate linkage
  misc_feature (69)..(70): phosphorothioate linkage
  misc_feature (70)..(71): phosphorothioate linkage
taacggcagacttctccacaggagtcaggtgcaccgtggtgtctgtttgaggttgctagtgaacacagttg

SEQ ID NO: 4352 - DNA, 28 bp, Homo sapiens
agtctgccgttactgccctgtggggcaa

SEQ ID NO: 4353 - DNA, 28 bp, Homo sapiens
agtctgccgttactgccctgtgaggcaa

SEQ ID NO: 4354 - DNA, 13 bp, Homo sapiens
cctgtgaggcaag

SEQ ID NO: 4355 - DNA, 33 bp, Homo sapiens
atggtgcacctgactcctgtggagaagtctgcc

SEQ ID NO: 4356 - DNA, 33 bp, Homo sapiens
acggtgcacctgactcctgtggagaagtctgcc

SEQ ID NO: 4357 - DNA, 14 bp, Homo sapiens
gacaccacggtgca

SEQ ID NO: 4358 - DNA, 74 bp, Artificial Sequence
  Description of Artificial Sequence: Synthetic oligonucleotide
  modified_base (35): LNA monomer
  modified_base (38): LNA monomer
ctcgtgctttcagcttcgatgtaggagggcgtgggtacgtcctgcgggtaaatagctgcgccgatggtttctac

SEQ ID NO: 4359 - DNA, 74 bp, Artificial Sequence
  Description of Artificial Sequence: Synthetic oligonucleotide
  modified_base (38): LNA monomer
  modified_base (53): LNA monomer
ctcgtgctttcagcttcgatgtaggagggcgtggatacgtcctgcgggtaaacagctgcgccgatggtttctac

SEQ ID NO: 4360 - DNA, 74 bp, Artificial Sequence
  Description of Artificial Sequence: Synthetic oligonucleotide
  modified_base (38): LNA monomer
  modified_base (65): LNA monomer
ctcgtgctttcagcttcgatgtaggagggcgtggatacgtcctgcgggtaaatagctgcgccgacggtttctac

SEQ ID NO: 4361 - DNA, 74 bp, Artificial Sequence
  Description of Artificial Sequence: Synthetic oligonucleotide
  misc_feature (1)..(2): phosphorothioate linkage
  misc_feature (2)..(3): phosphorothioate linkage
  misc_feature (3)..(4): phosphorothioate linkage
  modified_base (38): LNA monomer
  misc_feature (71)..(72): phosphorothioate linkage
  misc_feature (72)..(73): phosphorothioate linkage
  misc_feature (73)..(74): phosphorothioate linkage
ctcgtgctttcagcttcgatgtaggagggcgtggatacgtcctgcgggtaaatagctgcgccgatggtttctac

SEQ ID NO: 4362 - DNA, 74 bp, Artificial Sequence; identical to SEQ ID NO: 4348
  Description of Artificial Sequence: Synthetic oligonucleotide
  misc_feature (1)..(2): phosphorothioate linkage
  misc_feature (2)..(3): phosphorothioate linkage
  misc_feature (3)..(4): phosphorothioate linkage
  modified_base (37): LNA monomer
  misc_feature (71)..(72): phosphorothioate linkage
  misc_feature (72)..(73): phosphorothioate linkage
  misc_feature (73)..(74): phosphorothioate linkage

SEQ ID NO: 4363 - DNA, 21 bp, Artificial Sequence
  Description of Artificial Sequence: Primer
ctattggtctccttaaacctg

SEQ ID NO: 4364 - DNA, 40 bp, Artificial Sequence
  Description of Artificial Sequence: Synthetic oligonucleotide
cccccccccccccccccaagtctgccgttactgccctgtg

SEQ ID NO: 4365 - DNA, 54 bp, Artificial Sequence
  Description of Artificial Sequence: Synthetic oligonucleotide
ttttttttttttttttttttttttttttttttttgcaacctcaaacagacacca

SEQ ID NO: 4366 - DNA, 74 bp, Artificial Sequence
  Description of Artificial Sequence: Synthetic oligonucleotide
  misc_feature (1)..(2): phosphorothioate linkage
  misc_feature (2)..(3): phosphorothioate linkage
  misc_feature (3)..(4): phosphorothioate linkage
  misc_feature (71)..(72): phosphorothioate linkage
  misc_feature (72)..(73): phosphorothioate linkage
  misc_feature (73)..(74): phosphorothioate linkage
caacctcaaacagacaccatggtgcacctgactcctgtggagaagtctgccgttactgccctgtggggcaaggt

SEQ ID NO: 4367 - DNA, 74 bp, Artificial Sequence
  Description of Artificial Sequence: Synthetic oligonucleotide
  misc_feature (1)..(2): phosphorothioate linkage
  misc_feature (2)..(3): phosphorothioate linkage
  misc_feature (3)..(4): phosphorothioate linkage
  misc_feature (71)..(72): phosphorothioate linkage
  misc_feature (72)..(73): phosphorothioate linkage
  misc_feature (73)..(74): phosphorothioate linkage
accttgccccacagggcagtaacggcagacttctccacaggagtcaggtgcaccatggtgtctgtttgaggttg

SEQ ID NO: 4368 - DNA, 71 bp, Artificial Sequence
  Description of Artificial Sequence: Synthetic oligonucleotide
  modified_base (1): LNA monomer
  modified_base (71): LNA monomer
acctcaaacagacaccatggtgcacctgactcctgtggagaagtctgccgttactgccctgtggggcaagg

SEQ ID NO: 4369 - DNA, 51 bp, Artificial Sequence
  Description of Artificial Sequence: Synthetic oligonucleotide
  misc_feature (1)..(2): phosphorothioate linkage
  misc_feature (2)..(3): phosphorothioate linkage
  misc_feature (3)..(4): phosphorothioate linkage
  modified_base (38): LNA monomer
  misc_feature (48)..(49): phosphorothioate linkage
  misc_feature (49)..(50): phosphorothioate linkage
  misc_feature (50)..(51): phosphorothioate linkage
gacaccatggtgcacctgactcctgtggagaagtctgccgttactgccctg

SEQ ID NO: 4370 - DNA, 71 bp, Artificial Sequence; identical to SEQ ID NO: 4368
  Description of Artificial Sequence: Synthetic oligonucleotide
  misc_feature (1)..(2): phosphorothioate linkage
  misc_feature (2)..(3): phosphorothioate linkage
  misc_feature (3)..(4): phosphorothioate linkage
  misc_feature (68)..(69): phosphorothioate linkage
  misc_feature (69)..(70): phosphorothioate linkage
  misc_feature (70)..(71): phosphorothioate linkage

SEQ ID NO: 4371 - DNA, 40 bp, Artificial Sequence
  Description of Artificial Sequence: Synthetic oligonucleotide
tttttttttttttttgacaccatggtgcacctgactcctg

SEQ ID NO: 4372 - DNA, 40 bp, Artificial Sequence
  Description of Artificial Sequence: Synthetic oligonucleotide
ttttttttttttttttttttcagtaacggcagacttctcc

SEQ ID NO: 4373 - DNA, 20 bp, Artificial Sequence
  Description of Artificial Sequence: Primer
tcctaagccagtgccagaag

SEQ ID NO: 4374 - DNA, 21 bp, Artificial Sequence
  Description of Artificial Sequence: Primer
ctattggtctccttaaacctg

SEQ ID NO: 4375 - DNA, 21 bp, Artificial Sequence
  Description of Artificial Sequence: Primer
tcctaagccagtgccagaaga
